(19) United States
(12) Patent Application Publication
(10) Pub. No.: US 2026/0146259 A1
(43) Pub. Date: May 28, 2026

(54) COMPOSITIONS AND SYSTMES FOR HERPES SIMPLEX VIRUS PACKAGING AND USES THEREOF

(71) Applicants: Opentrons Labworks Inc., Long Island City, NY (US); University of Pittsburgh - Of the Commonwealth System of Higher Education, Pittsburgh, PA (US)

(72) Inventors: Leslie MITCHELL, New York, NY (US); Megan HOGAN, New York, NY (US); Thomas DESMARAIS, New York, NY (US); Joseph C. GLORIOSO, III, Cambridge, MA (US); William F. GOINS, Pittsburgh, PA (US); Selene INGUSCI, Pittsburgh, PA (US); Justus Bernard COHEN, Allison Park, PA (US)

(21) Appl. No.: 19/121,300

(22) PCT Filed: Oct. 20, 2023
(86) PCT No.: PCT/US2023/077467

§ 371 Date: Apr. 15, 2025

Related U.S. Application Data
(60) Provisional application No. 63/380,315, filed on Oct. 20, 2022.

(51) Int. Cl. C12N 15/86; C12N 7/02; C12N 9/22; C12N 15/113

(52) U.S. Cl. CPC C12N 15/86; C12N 7/025; C12N 9/226; C12N 15/113; C12N 2310/20; C12N 2710/16652; C12N 2800/107; C12N 2830/003; C12N 2830/34; C12N 2830/36

(57) ABSTRACT

Provided herein are compositions for a Herpes Simplex Virus packaging system and packaging cell line. Also provided herein are compositions, systems, and methods for producing a packaging cell line for Herpes Simplex Virus amplicons.

### CROSS REFERENCE

[0001] This application claims the benefit of U.S. Provisional Application No. 63/380,315, filed on Oct. 20, 2022, which is incorporated herein by reference in its entirety.

### STATEMENT AS TO FEDERALLY SPONSORED RESEARCH

[0002] This invention was made with the support of the United States government under Grant No. 1R43TR003558-01A1 awarded by the Small Business Innovation Research (SBIR). The government has certain rights in the invention.

### SEQUENCE LISTING

[0003] This instant application contains a Sequence Listing which has been submitted electronically in XML format and is hereby incorporated by reference in its entirety. Said XML copy, created on Oct. 18, 2023, is named 59725-714_601_SL.xml and is 1,102,159 bytes in size.

### BACKGROUND

[0004] Gene therapy has been rapidly developing as a treatment strategy for diseases affecting a variety of distinct metabolic, neurologic and cancer-related conditions. The challenge of gene therapy remains the creation of gene delivery vehicles that provide novel genetic information to different cell and tissue types and express the desired gene of interest at appropriate levels and duration. The gene therapy field has endeavored to take advantage of viral systems engineered to remove viral replication and cytotoxic functions. The bar for viral vectors is high since they must be safe and nonpathogenic, amenable to consistent manufacture, and capable of delivering a therapeutic payload to the correct tissue and cell type. The therapeutic gene may need to be expressed not only at the appropriate level, and thus be regulated either by transcriptional or post-transcriptional mechanisms, but also for an appropriate length of time in order to achieve maximal benefit. In addition, the therapy may need to persist without damage to the transduced cells or recruitment of immune responses that could eliminate corrected cells and shut down transgene expression. Furthermore, production of viral vectors with sufficient quantity and quality (e.g., purity) poses another challenge to the practice of gene therapy. Therefore, there is a desire for improved vector systems and packaging cell lines.

### SUMMARY

[0005] In some aspects, provided herein is a packaging cell line comprising a recombinant genome, wherein the recombinant genome comprises a. a first nucleic acid sequence comprising one or more Herpes Simplex Virus (HSV) Class I genes; and b. a second nucleic acid sequence comprising one or more HSV Class I and Class II genes.

[0006] In some aspects, provided herein is a composition comprising a recombinant genome, wherein the recombinant genome comprises a. a first nucleic acid sequence comprising one or more Herpes Simplex Virus (HSV) Class I genes; and b. a second nucleic acid sequence comprising one or more HSV Class I and Class II genes.

[0007] In some aspects, provided herein is a method of producing a packaging cell line comprising introducing into a cell comprising a genome: a. a first nucleic acid sequence comprising one or more Herpes Simplex Virus (HSV) Class I genes; and b. a second nucleic acid sequence comprising one or more HSV Class I and Class II genes.

[0008] In some embodiments, the first nucleic acid sequence or the second nucleic acid sequence may comprise one or more regulatory elements that are functionally connected to one or more HSV Class I genes or HSV Class II genes. These one or more regulatory elements may comprise, in some embodiments, an enhancer, a promoter, a terminator, or a combination thereof. For example, the one or more regulatory elements may comprise a promoter comprising a natural (or native) promoter of HSV Class I genes or HSV Class II genes, a conditional promoter, or an inducible promoter (e.g., Tet-On promoter). An inducible promoter can be useful for controlling and/or managing the expression of a gene (e.g., HSV Class I or HSV Class II genes) that may be toxic to host cells or packaging cell lines or a gene for which constitutive expression is not required (e.g., transient expression at a specific time is needed). In some embodiments, the first nucleic acid sequence, the second nucleic acid sequence, or the recombinant genome of the packaging cell line may not comprise an HSV origin of replication (ori), an HSV packaging signal (pac), or a combination thereof.

[0009] In some embodiments, the first nucleic acid sequence or the second nucleic acid sequence may be introduced to a first genomic safe harbor site of the recombinant genome comprising a human ortholog of the mouse Rosa26 locus (or Rosa26 homolog locus). In some embodiments, the first nucleic acid sequence or the second nucleic acid sequence may be introduced to a second genomic safe harbor site of the recombinant genome comprising an adeno-associated virus site 1 (AAVS1) locus.

[0010] In some aspects, provided herein, is a system for producing a Herpes Simplex Virus (HSV) amplicon particle comprising a. any packaging cell line descried herein; and b. an amplicon vector. In some embodiments, the amplicon vector may not comprise the one or more HSV Class I genes or the one or more HSV Class II genes introduced to the packing cell line described herein. Accordingly, in some embodiments, the amplicon vector can comprise a cargo nucleic acid sequence comprising up to about 150 kb. In some embodiments, the amplicon vector may comprise an HSV origin of replication (ori), an HSV packaging signal (pac), or a combination thereof. In some embodiments, the HSV amplicon particle produced and isolated from the packaging cell line can be re-introduced to the packing cell line for high titer HSV amplicon particle production.

### INCORPORATION BY REFERENCE

[0011] Each patent, publication, and non-patent literature cited in the application is hereby incorporated by reference in its entirety as if each was incorporated by reference individually. To the extent publications and patents or patent applications incorporated by reference contradict the disclosure contained in the specification, the specification is intended to supersede and/or take precedence over any such contradictory material.

### BRIEF DESCRIPTION OF THE DRAWINGS

[0012] The features of the present disclosure are set forth with particularity in the appended claims. A better understanding of the features and advantages of the present disclosure will be obtained by reference to the following detailed description that sets forth illustrative embodiments, in which the principles of the disclosure are utilized, and the accompanying drawings (also “Figure” and “FIG.” herein), of which:

[0013] FIGS. 1A-1C show a schematic representation of various components of the present disclosure. FIG. 1A shows that an HSV amplicon vector can accommodate up to about 150 kb of payload DNA for delivery to cells. The HSV amplicon vector also comprises HSV origin of replication (ori) and packaging (pac) sequences, as well as HSV Class I gene subset A and HSV Class II gene subset A. FIG. 1B shows that the HSV amplicon vector can be introduced into an HSV packaging cell line by transfection. The HSV packaging cell line has HSV Class I genes and HSV Class II genes inserted at 2 distinct genomic safe harbor (GSH) sites on different chromosomes, denoted as GSH 1 (yellow) and GSH 2 (orange). HSV Class I genes can be inserted at GSH 1, while HSV Class II genes can be inserted at GSH 2. FIG. 1C shows that when the HSV amplicon vector is introduced into the HSV packaging cell line. HSV amplicon particles can be produced and isolated for DNA delivery applications. Such HSV amplicon particles can be used for re-passaging to increase titer.

[0014] FIGS. 2A and 2B show insertion of UL19, UL20, and UL21 at a REWRITE landing pad located at the AAVS1 locus (GSH2). FIG. 2A shows a schematic drawing of a gene cassette containing HSV class II genes (UL19, UL20, and UL21) integrated at GSH2. FIG. 2B shows an exemplary readout of whole-genome sequencing (WGS) after enrichment for sequences (Capture-seq) at the AAVS1 genome and sequences contained in the synHSV93 genome in U2OS-4/27+UL19-21 cells.

[0015] FIGS. 3A and 3B show complementation of ICP4 (IE175 gene) and ICP27 (UL54 gene) in U2OS-4/27+UL19-21 cells. FIG. 3A shows representative fluorescent images of JDNI8-4 plaques for each cell line (U2OS-4/27 cells, U2OS+REWRITE Landing Pad cells, U2OS-4/27+UL19-21 pooled clones and individual clones of U2OS-4/27+UL19-21) at 5 days post-infection (dpi). FIG. 3B shows viral titers for individual clones normalized to U2OS-4/27.

[0016] FIG. 4 shows complementation of VP5 (UL19 gene) in U2OS-4/27+UL19-21 cells by infection with a replication competent virus deleted for UL19 gene (ΔVP5; HSV-KOS deleted for VP5/UL19 gene).

[0017] FIGS. 5A and 5B show comparison of ΔVP5 HSV virus pfu titer in U2OS-4/27+UL19-21 clones and G5 (packaging cell line stably transduced to express UL16-UL21 HSV genes, used to complement ΔVP5 virus). FIG. 5A shows representative images of plaques formed by each cell line with 10⁻⁶ dilution of ΔVP5 HSV virus at 7 dpi. G5 and U2OS-4/27+UL19-21 clones were infected with serial dilution of dVP5. U2OS-4/27 and Vero cells were infected similarly (negative controls). FIG. 5B shows titer (pfu/ul) for each cell line with ΔVP5 HSV virus. Titer was determined by plaque count at 7 dpi.

[0018] FIGS. 6A and 6B show complementation of VP5 (UL19 gene), UL20p (UL20 gene) and UL21 (UL21 gene) in U2OS-4/27+UL19-21 clones. FIG. 6A shows that U2OS-4/27+UL19-21 clones complement replication deficient mutant HSV vector JDNI8-AUL19-UL21 (JDNI8 vector deleted additionally for UL19-UL21 genes). FIG. 6B shows propagation of the JDN18-ΔUL19-UL21 vector on U2OS-4/27+UL19-21 clones.

[0019] FIGS. 7A and 7B show insertion of synHSV128 genome at a REWRITE landing pad located at the AAVS1 locus (GSH2). FIG. 7A shows a schematic drawing of a synthetic genome integrated at GSH2. FIG. 7B shows an exemplary readout of whole-genome sequencing (WGS) after enrichment for sequences (Capture-seq) at the AAVS1 genome and sequences contained in the synHSV128 genome in U2OS+synHSV128.

[0020] FIGS. 8A and 8B show complementation of replication competent HSV viruses with synHSV128 packaging cells. FIG. 8A shows complementation of a ΔVP5 replication competent virus (ΔVP5; HSV-KOS deleted for VP5 gene) in U2OS+synHSV128 packaging cells. FIG. 8B shows complementation of a ΔgD (US6 gene) replication competent virus (ΔgD; HSV-KOS deleted for gD/US6 gene) in Vero VD60 (ΔgD virus packaging cell line stably transduced to express gD/US6 gene), U2OS-synHSV128, and Vero cells (negative control).

### DETAILED DESCRIPTION

[0021] Provided herein are compositions and systems for a packaging cell line comprising a recombinant genome, wherein the recombinant genome comprises a nucleic acid sequence comprising one or more Herpes Simplex Virus (HSV) Class I genes and/or a nucleic acid sequence comprising one or more HSV Class I and Class II genes. Also provided herein are methods for producing packaging cell lines described herein.

### Definitions

[0022] As used in this specification and the appended claims, the singular forms “a,” “an,” and “the” include plural referents unless the content clearly dictates otherwise. It should also be noted that the term “or” is generally employed in its sense including “and/or” unless the content clearly dictates otherwise. The terms “and/or,” “a combination thereof,” and “any combination thereof” and their grammatical equivalents as used herein, can be used interchangeably. These terms can convey that any combination is specifically contemplated. Solely for illustrative purposes, the following phrases “A, B, and/or C,” “A, B, C, or a combination thereof,” or “A, B. C, or any combination thereof” can mean “A individually; B individually; C individually; A and B; B and C; A and C; and A, B, and C.” The term “or” can be used conjunctively or disjunctively, unless the context specifically refers to a disjunctive use.

[0023] The term “about” or “approximately” can mean within an acceptable error range for the particular value, which may depend in part on how the value is measured or determined, e.g., the limitations of the measurement system. For example, “about” can mean within 1 or more than 1 standard deviation. Alternatively, “about” can mean a range of up to 20%, up to 10%, up to 5%, or up to 1% of a given value. Alternatively, particularly with respect to biological systems or processes, the term can mean within an order of magnitude, within 5-fold, or within 2-fold, of a value. Where particular values are described in the application and claims, unless otherwise stated the term “about” meaning within an acceptable error range for the particular value should be assumed.

[0024] Throughout this disclosure, numerical features are presented in a range format. It should be understood that the description in range format is merely for convenience and brevity and should not be construed as an inflexible limitation on the scope of any embodiments. Accordingly, the description of a range should be considered to have specifically disclosed all the possible subranges as well as individual numerical values within that range to the tenth of the unit of the lower limit unless the context clearly dictates otherwise. For example, description of a range such as from 1 to 6 should be considered to have specifically disclosed subranges such as from 1 to 3, from 1 to 4, from 1 to 5, from 2 to 4, from 2 to 6, from 3 to 6 etc., as well as individual values within that range, for example, 1.1, 2, 2.3, 5, and 5.9. This applies regardless of the breadth of the range. The upper and lower limits of these intervening ranges may independently be included in the smaller ranges, and are also encompassed within the present disclosure, subject to any specifically excluded limit in the stated range. Where the stated range includes one or both of the limits, ranges excluding either or both of those included limits are also included in the present disclosure, unless the context clearly dictates otherwise.

[0025] As used in this specification and claim(s), the words “comprising” (and any form of comprising, such as “comprise” and “comprises”), “having” (and any form of having, such as “have” and “has”), “including” (and any form of including, such as “includes” and “include”) or “containing” (and any form of containing, such as “contains” and “contain”) are inclusive or open-ended and do not exclude additional, unrecited elements or method steps. It is contemplated that any embodiment discussed in this specification can be implemented with respect to any method or composition of the present disclosure, and vice versa. Furthermore, compositions of the present disclosure can be used to achieve methods of the present disclosure.

[0026] Reference in the specification to “embodiments,” “certain embodiments,” “preferred embodiments,” “specific embodiments,” “some embodiments,” “an embodiment,” “one embodiment” or “other embodiments” means that a particular feature, structure, or characteristic described in connection with the embodiments is included in at least some embodiments, but not necessarily all embodiments, of the present disclosures. To facilitate an understanding of the present disclosure, a number of terms and phrases are defined below.

[0027] Certain specific details of this description are set forth in order to provide a thorough understanding of various embodiments. However, one skilled in the art will understand that the present disclosure may be practiced without these details. In other instances, well-known techniques or methods have not been shown or described in detail to avoid unnecessarily obscuring descriptions of the embodiments. Unless the context requires otherwise, throughout the specification and claims which follow, the word “comprise” and variations thereof, such as, “comprises” and “comprising” are to be construed in an open, inclusive sense, that is, as “including, but not limited to.” Further, headings provided herein are for convenience only and do not interpret the scope or meaning of the claimed disclosure.

[0028] The terms “nucleic acid sequence,” “polynucleic acid sequence,” and/or “nucleotide sequence” are used herein interchangeably and have the identical meaning herein and refer to DNA or RNA. In some embodiments, a nucleic acid sequence is a polymer comprising or consisting of nucleotide monomers, which are covalently linked to each other by phosphodiester-bonds of a sugar/phosphate-backbone. The terms “nucleic acid sequence,” “polynucleic acid sequence,” and “nucleotide sequence” may encompass unmodified nucleic acid sequences, i.e., comprise unmodified nucleotides, or natural nucleotides. In some embodiments, “natural nucleotide,” “unmodified nucleotide.” and/or “canonical nucleotide” are used herein interchangeably and have the identical meaning herein and refer to the naturally occurring nucleotide bases adenine (A), guanine (G), cytosine (C), uracil (U), and/or thymine (T). The terms “nucleic acid sequence,” “polynucleic acid sequence,” and “nucleotide sequence” may also encompass modified nucleic acid sequences, such as base-modified, sugar-modified or backbone-modified etc., DNA or RNA.

[0029] Although methods and materials similar or equivalent to those described herein can be used in the practice or testing of the present disclosure, suitable methods, and materials are described below.

### Herpes Simplex Virus (HSV) and HSV Vectors

[0030] Herpes Simplex Virus (HSV) is an enveloped virus containing a double stranded DNA genome that is over 150 kb. As used herein. HSV may be HSV-1 or HSV-2. In some embodiments, the HSV may be HSV-1. In some embodiments, the HSV may be HSV-2. The linear double-stranded DNA HSV genome is divided into a unique long (UL) region and a unique short (US) region, which are bounded by regions of inverted repeats, termed internal repeats, i.e., two copies of a long inverted repeat (RL), and two copies of a short inverted repeat (RS). The genome termini are bounded by regions of direct repeats, termed terminal repeats (TR). For example, the core of the HSV-1 virion contains a 152-kb double-stranded linear DNA genome, which encodes 80-85 viral genes in the UL and US regions. The inverted repeat sequences flanking the UL and US regions comprise sequences required for cleavage/packaging of the HSV-1 genome.

[0031] HSV genes are expressed in waves, referred to as “cascade regulation,” producing first the immediate early (IE), then the early (E), and finally the late (L) gene products. The gene program is launched by a component of the infecting particle, the viral tegument protein VP16 delivered to the cell nucleus during infection that induces the expression of IE genes through binding to a viral enhancer sequence present in multiple copies within the IE gene promoters. The IE gene products have multiple functions including transactivation of the early genes, mRNA transport, and interfering with innate host immune responses that include STING activation and IFN production. The early gene products are primarily responsible for viral genome replication whereupon the late genes are expressed that encode primarily structural proteins needed for DNA packaging and particle assembly. As used herein, HSV Class I genes may comprise IE genes. In some embodiments, HSV class I genes may comprise ICP4, ICP27, ICP0, ICP22. ICP34.5. VP16, or a combination thereof. HSV Class II genes may comprise early genes, including but not limited to UL1, UL2, UL3, UL4, UL5, UL6, UL7, UL8, UL9, UL10, UL 11, UL12, UL13, UL14, UL15, UL16, UL17, UL18, UL19, UL20, UL21, UL22, UL23, UL24, UL25, UL26, UL26.5, UL27, UL28, UL29, UL30, UL31, UL32, UL33, UL34, UL35, UL36, UL37, UL38, UL39, UL40, UL41, UL42, UL43, UL44, UL45, UL46, UL47, UL49, UL49A, UL50, UL51, UL52, UL53, UL55, UL56, US1, US2, US3, US4, USS. US6, US7, US8. US9, US10, US11, and US12.

[0032] Many of the HSV genes are not essential for virus production per se but rather are important to carry out the complex life cycle in the host in vivo. HSV infects host cells using an attachment/fusion entry mechanism minimally requiring 5 envelope glycoproteins (gB, gC, gD, gH/gL) and virus production occurs in the host cell nucleus. Virus replication is lytic and newly formed particles acquire their envelope through nuclear membrane budding, Golgi processing, and envelope exchange at the cell surface. HSV in the latent phase can persist for life in sensory neurons of the peripheral nervous system, and in brain if infected. The viral genomes are maintained as episomes and their copy number can be high. During latency, viral lytic genes are largely silenced and only the noncoding latency associated transcript (LAT) gene is expressed. The virus is capable of reactivation from latency, which provides a means of virus spread to other individuals by direct contact with a recurrent lesion. Like HSV genomes in latency, replication-defective HSV and amplicon genomes remain extrachromosomal, but unlike latent HSV, in a cell-type independent manner. HSV vector technologies (including sequence information) are described in U.S. Pat. Nos. 5,658,724, 5,804,413, 5,849,571, 5,849,572, 5,879,934, 5,998,174, 6,261,552, 7,078,029, 7,531,167, 10,174,341, and 10,201,575.

[0033] As used herein. HSV vectors can include replication defective (or deficient) HSV vectors and HSV amplicon vectors. As used herein, the replication defective (or deficient) HSV vectors can refer to HSV vectors where “essential” genes (e.g., Class I genes and/or Class II genes) are muted, deleted, or replaced with transgenes intended for long-term expression from the otherwise quiescent viral episomal genome. In some embodiments of the present disclosure, HSV vectors may comprise a mutation or deletion of Class I genes. e.g., mutation or deletion of ICP4, ICP27, ICP0, ICP22, ICP34.5, VP16, or a combination thereof. Additionally or alternatively, in some embodiments, HSV vectors may comprise a mutation or deletion of Class II genes, e.g., mutation or deletion of UL1, UL2, UL3, UL4, UL5, UL6, UL7, UL8, UL9, UL10, UL 11, UL12, UL13, UL14, UL15, UL16, UL17, UL18, UL19, UL20, UL21, UL22, UL23, UL24, UL25, UL26, UL26.5, UL27, UL28, UL29, UL30, UL31, UL32, UL33, UL34, UL35, UL36, UL37, UL38, UL39, UL40, UL41, UL42, UL43, UL44, UL45, UL46, UL47, UL49, UL49A, UL50, UL51, UL52, UL53, UL55, UL56, US1, US2, US3, US4, US5, US6, US7, US8, US9, US10, US11, US12, or a combination thereof. In some embodiments. HSV vectors may comprise a mutation in or deletion of UL19, UL20, UL21, or a combination thereof. In some embodiments, HSV vectors may comprise a mutation in or deletion of UL19, UL20, and UL21. In some embodiments, HSV vectors may comprise a mutation in or deletion of UL19, UL20, UL21, UL41, or a combination thereof. In some embodiments, HSV vectors may comprise a mutation in or deletion of UL19, UL20, UL21, and UL41.

[0034] The amplicon vector of the present technology may be an amplicon plasmid comprising ori/pac sequences and a plasmid backbone, or minicircle DNA comprising ori/pac sequences. Each of the amplicon plasmid and minicircle additionally may comprise at least one cargo sequence or payload comprising a transgene. Therefore, the amplicon vector may comprise ori/pac sequences and at least one cargo sequence comprising a transgene. In some embodiments, the amplicon vector may additionally comprise one or more HSV Class II genes. In some embodiments, the amplicon vector may additionally comprise one or more HSV Class I genes. In some embodiments, an HSV amplicon may further comprise a bacterial origin of DNA replication and an antibiotic resistance gene for propagation in bacteria. In some embodiments, a bacterial origin of DNA replication may comprise ColE1. In some embodiments, an antibiotic resistance gene may include Ampicillin resistance.

[0035] The plasmid backbone in the amplicon vector may comprise a bacterial artificial chromosome (BAC) cassette. The inclusion of such BAC cassette facilitates propagation and manipulation of the amplicon vector within bacteria. The BAC cassette can include bacterially-expressed sequences that assist in the use of bacterial strains, e.g., selectable genes, such as genes conferring bacterial resistance to antibiotics or toxins (e.g., chloramphenicol, tetracycline, ampicillin, and zeocin). The BAC cassette can further include reporter genes under the control of a eukaryotic promoter, such as a constitutive mammalian promoter. Examples of reporter genes can include, but are not limited to, LacZ encoding beta-galactosidase or a fluorescent protein. Examples of a fluorescent protein can include, but are not limited to, GFP, YFP, RFP, and analogues thereof. In some embodiments, an RFP can comprise mCherry. In some embodiments, analogues of GFP, YFP, or RFP can comprise iRFP, EGFP, or the like. Examples of a constitutive mammalian promoter can include, but are not limited to, an SV40, RSV, CMV, ubiquitin C (UbC), CAG, or Beta-actin promoter. In some embodiments, the amplicon vector may comprise a Flag-tagged luciferase. In some embodiments, the Flag-tagged luciferase expression may be under the control of CAG promoter. In some embodiments, the reporter genes may be under the control of an HSV promoter. For example, the reporter genes may be under the control of an HSV Class I gene promoter or an HSV Class II gene promoter. In some embodiments, the amplicon vector may comprise a GFP. In some embodiments, the GFP expression may be under the control of an oriS+IE4/5 promoter.

[0036] The plasmid backbone in the amplicon vector may further comprise a yeast artificial chromosome (YAC) cassette. The inclusion of such YAC cassette can facilitate propagation and manipulation of the amplicon vector within yeast. The YAC cassette can include yeast-expressed and non-expressed sequences that assist in the use of yeast strains, e.g., selectable genes, such as genes conferring yeast resistance to nutrient deficient growth media (e.g., uracil-deficient media, lysine-deficient media, and leucine-deficient media) and sequences required for propagation (e.g., centromere and replication origin). In the instance where a YAC cassette is positioned adjacent to a BAC cassette, this can be referred to as a BAC/YAC cassette.

[0037] The BAC, YAC, or BAC/YAC cassette can be inserted into the amplicon vector in any suitable location. The BAC cassette can be flanked by sequences facilitating removal of the BAC, YAC, or BAC/YAC cassette, such as by site-specific recombinase recognition sites/consensus sequences (e.g., those recognized by enzymes such as cre, dre, flp, KD, B2, B3, R, etc.). The inclusion of such sites facilitates excision of the BAC cassette, if desired, since BAC, YAC, or BAC/YAC sequences have been shown to reduce virus growth in cultured cells, stimulate an innate response, and promote transgene silencing in infected cells. Excision of the BAC, YAC, or BAC/YAC cassette also can increase the capacity for the vector to incorporate one or more transgenes, since BAC, YAC, or BAC/YAC cassettes are on the order of about 11-15 kb. The amplicon vector can have one or more (e.g., one, two, three, four, or five) consensus recognition sequences for a recombinase enzyme (e.g., loxP), particularly one not native to the HSV genome. Removal of a BAC, YAC, or BAC/YAC cassette using a cell line that expresses an appropriate site-specific recombinase for excising the BAC, YAC, or BAC/YAC cassette leaves a single copy of the one or more consensus sequences for a recombinase enzyme within the amplicon genome. The bacterial sequences may also be eliminated by inducible integrase-mediated “looping-out” and selective degradation of the bacterial elements flanked by compatible att sites, similar to plasmid-derived minicircle production but requiring a BAC, YAC, or BAC/YAC-compatible minicircle E. coli strain.

[0038] Replication defective (or deficient) HSV vectors are similar to HSV amplicons in that both are designed to deliver and express transgene(s) in the absence of the normal HSV gene expression cascade, but differ in transgene payload capacity and viral gene content. Specifically, while HSV amplicons described herein may enable ˜150 kb of payload and carry no viral protein coding genes, replication-defective vectors may provide at best ˜40 kb of transgene capacity given that the remainder of the genome encodes viral genes. It is not clear that all viral genes will remain silent under conditions that favor HSV reactivation and, thus, the complete elimination of all viral genes afforded in HSV amplicon vectors may improve the safety profile of the vector. As such, in a preferred embodiment, the HSV vectors of the present technology is an HSV amplicon.

[0039] The HSV amplicons described herein may be present as isolated DNA, DNA within a cell, or packaged in a viral envelope (e.g., a HSV amplicon particle). Provided herein are complementing packaging cell lines engineered to express one or more essential replication and/or packaging genes for production of HSV amplicon particles. Packaging cell lines described herein allows more space for payload or cargo sequence in HSV amplicon vectors as HSV amplicon vectors need to provide HSV replication and/or packaging signals, but not any essential replication or packaging genes. Upon transfection of the amplicon vector into the packaging cell line, infectious amplicon particles comprising one or more (e.g., one, two, three, four, or ranges of any of these values) tandem copies of the amplicon DNA surrounded by the HSV capsid, tegument, and envelope proteins may be produced.

### Engineering Packaging Cell Lines and Recombinant Genome

[0040] In one aspect, provided herein is a packaging cell line comprising a recombinant genome, wherein the recombinant genome may comprise (a) a first nucleic acid sequence comprising one or more Herpes Simplex Virus (HSV) Class I genes; and/or (b) a second nucleic acid sequence comprising one or more HSV Class I and Class II genes. In another aspect, provided herein is a packaging cell line comprising a recombinant genome, wherein the recombinant genome may comprise (a) a first nucleic acid sequence comprising one or more Herpes Simplex Virus (HSV) Class I genes and Class II genes; and/or (b) a second nucleic acid sequence comprising one or more HSV Class I genes.

[0041] In some embodiments, a first nucleic acid sequence or a second nucleic acid sequence may comprise a sequence with at least 50% sequence identity to one or more HSV Class I genes. In some embodiments, a first nucleic acid sequence or a second nucleic acid sequence may comprise a sequence with at least 50%, at least 55%, at least 60%, at least 65%, at least 70%, at least 75%, at least 80%, at least 85%, at least 90%, at least 91%, at least 92%, at least 93%, at least 94%, at least 95%, at least 96%, at least 97%, at least 98%, at least 98.5%, at least 98.6%, at least 98.7%, at least 98.8%, at least 98.9%, at least 99%, at least 99.1%, at least 99.2%, at least 99.3%, at least 99.4%, at least 99.5%, at least 99.6%, at least 99.7%, at least 99.8%, at least 99.8%, at least 99.9%, or 100% sequence identity to one or more HSV Class I genes. In some embodiments, the one or more HSV Class I genes may comprise ICP4, ICP27, ICP0, ICP22, ICP34.5, VP16, or a combination thereof. In some embodiments, the one or more HSV Class I genes may comprise ICP34.5, VP16, or a combination thereof. In some embodiments, the one or more HSV Class I genes may comprise ICP0, ICP34.5, VP16, or a combination thereof. In some embodiments, the one or more HSV Class I genes may comprise ICP4, ICP27, or a combination thereof. In some embodiments, the one or more HSV Class I genes may comprise ICP4, ICP0, ICP27, or a combination thereof.

[0042] Additionally, or alternatively, in some embodiments, a first nucleic acid sequence or a second nucleic acid sequence may comprise a sequence with at least 50% sequence identity to one or more HSV Class II genes. In some embodiments, a first nucleic acid sequence or a second nucleic acid sequence may comprise a sequence with at least 50%, at least 55%, at least 60%, at least 65%, at least 70%, at least 75%, at least 80%, at least 85%, at least 90%, at least 91%, at least 92%, at least 93%, at least 94%, at least 95%, at least 96%, at least 97%, at least 98%, at least 98.5%, at least 98.6%, at least 98.7%, at least 98.8%, at least 98.9%, at least 99%, at least 99.1%, at least 99.2%, at least 99.3%, at least 99.4%, at least 99.5%, at least 99.6%, at least 99.7%, at least 99.8%, at least 99.8%, at least 99.9%, or 100% sequence identity to one or more HSV Class II genes. In some embodiments, the one or more HSV Class II genes may comprise UL1, UL2, UL3, UL4, UL5, UL6, UL7, UL8, UL9, UL10, UL 11, UL 12, UL13, UL14, UL15, UL16, UL17, UL18, UL19, UL20, UL21, UL22, UL23, UL24, UL25, UL26, UL26.5, UL27, UL28, UL29, UL30, UL31, UL32, UL33, UL34, UL35, UL36, UL37, UL38, UL39, UL40, UL41, UL42, UL43, UL44, UL45, UL46, UL47, UL49, UL49A, UL50, UL51, UL52, UL53, UL55, UL56, US1, US2, US3, US4, USS, US6, US7, US8, US9, US10, US11. US12, or a combination thereof. In some embodiments, HSV Class II genes may comprise UL19, UL20, UL21, or a combination thereof. In some embodiments, HSV Class II genes ma comprise UL19, UL20, UL21, UL41, or a combination thereof.

[0043] In some embodiments, the one or more HSV Class I or HSV Class II genes in the first nucleic acid sequence or the second nucleic acid sequence may be separated by a cleavage signal. Non-limiting examples of a cleavage signal can include a 2A cleavage signal, including but not limited to P2A, E2A, F2A, or T2A. 2A cleavage signals and sequences thereof are well known in the art and any known sequence can be used. In some embodiments, the one or more HSV Class I or HSV Class II genes in the first nucleic acid sequence or the second nucleic acid sequence may be codon-optimized.

[0044] In some embodiments, the first nucleic acid sequence may further comprise a first one or more regulatory elements that are functionally connected to one or more HSV Class I genes. In some embodiments, the first one or more regulatory elements may comprise an enhancer, a promoter, a terminator, or a combination thereof.

[0045] In some embodiments, the first one or more regulatory elements may comprise a promoter. The promoter may be any promoter desired to control/regulate the expression of the one or more HSV Class I genes. In one embodiment, the promoter may comprise a natural or native promoter of the one or more HSV Class I genes comprising ICP4, ICP27, ICP0, ICP22, ICP34.5, VP16, or a combination thereof. In some embodiments, the promoter may comprise a natural or native promoter of the one or more HSV Class I genes comprising ICP34.5, VP16, or a combination thereof. In some embodiments, the promoter may comprise a natural or native promoter of the one or more HSV Class I genes comprising ICP0, ICP34.5, VP16, or a combination thereof. In some embodiments, the promoter may comprise a natural or native promoter of the one or more HSV Class I genes comprising ICP4, ICP27, or a combination thereof. In some embodiments, the promoter may comprise a natural or native promoter of the one or more HSV Class I genes comprising ICP4, ICP0, ICP27, or a combination thereof.

[0046] Other exemplary promoters may include, but are not limited to, a cell-specific or tissue-specific promoter (e.g., EOS, OCT4, Nanog, SOX2 (for neural stem cells), aMHC, Brachyury, Tau, GFAP, NSE, Synapsin I (for neurons), Apo A-I, Albumin, ApoE (for liver), MCK, SMC a-Actin, Myosin heavy chain, Myosin light chain (for muscle, etc.)), such as a promoter that specifically or preferentially expresses genes in a defined cell type (e.g., within a liver cell, lung cell, epithelial cell, cardiac cell, neural cell, skeletal muscle cell, embryonic, induced pluripotent, or other stem cell, cancer cell, etc.). In some embodiments, the promoters for use in sensory neurons may include, but are not limited to, TRPV1, CGRP, or NF200.

[0047] In some embodiments of the present disclosure, the promoter may comprise a constitutive mammalian promoter. Exemplary constitutive mammalian promoters may include, but are not limited to, SV40, CMV, CAG, EF1a, UbC, RSV, β-actin, or PGK.

[0048] In other embodiments, the promoter may comprise an inducible promoter. Inducible promoters are well-known in the art. Exemplary inducible promoters may include, but are not limited to, a tetracycline-inducible promoter or a doxycycline-inducible promoter. In some embodiments, the inducible promoter may be a Tet-On promoter. In some embodiments, a Tet-On promoter may include, but is not limited to, TRE3G or TRE-tight. In some embodiments, Tet-On promoter may comprise TRE3G. In some embodiments, Tet-On promoter may comprise TRE-tight. When a Tet-On promoter is used, expression of its cognate rtTA is needed. For example, use of TRE3G as the promoter necessitates expression of the cognate dox-sensitive transactivator protein, rtTA3G. The cognate rtTA can be expressed from a vector or from target cells or tissue (e.g., by introduction of a viral (e.g., AAV) vector encoding the rtTA into the target cells or tissue). In some embodiments, an inducible promoter can be used to control and/or manage the expression of a gene that may be toxic to host cells or packaging cell lines (e.g., VP16 and ICP0).

[0049] In some embodiments, the second nucleic acid sequence may further comprise a second one or more regulatory elements that are functionally connected to one or more HSV Class II genes. In some embodiments, the second one or more regulatory elements may comprise an enhancer, a promoter, a terminator, or a combination of thereof. In some embodiments, the second one or more regulatory elements may comprise the promoter. In some embodiments, the promoter may be any one of the cell-specific or tissue-specific promoters, constitutive mammalian promoters, and inducible promoters as discussed above. In some embodiments, the promoter may comprise a natural or native promoter of the one or more HSV Class II genes comprising UL1, UL2, UL3, UL4, UL5, UL6, UL7, UL8, UL9, UL 10, UL 11, UL 12, UL13, UL14, UL15, UL16, UL17, UL18, UL19, UL20, UL21, UL22, UL23, UL24, UL25, UL26, UL26.5, UL27, UL28, UL29, UL30, UL31, UL32, UL33, UL34, UL35, UL36, UL37, UL38, UL39, UL40, UL41, UL42, UL43, UL44, UL45, UL46, UL47, UL49, UL49A, UL50, UL51, UL52, UL53, UL55, UL56, US1, US2, US3, US4, US5, US6, US7, US8, US9, US10, US11, US12, or a combination thereof. In some embodiments, the promoter may comprise a natural or native promoter of the one or more HSV Class II genes comprising UL19, UL20, UL21, or a combination thereof. In some embodiments, the promoter may comprise a natural or native promoter of the one or more HSV Class II genes comprising UL19, UL20, UL21, UL41, or a combination thereof.

[0050] In some embodiments, the first nucleic acid sequence or the second nucleic acid sequence may not comprise a nucleic acid sequence comprising an HSV origin of replication (ori), an HSV packaging signal (pac), or a combination thereof. In some embodiments, the recombinant genome may not comprise a nucleic acid sequence comprising oriL/S. In some embodiments, the recombinant genome may not comprise a nucleic acid sequence comprising an HSV origin of replication (ori), an HSV packaging signal (pac), or a combination thereof. In some embodiments, the recombinant genome may not comprise a nucleic acid sequence comprising oriL/S.

[0051] The packaging cell line may comprise any suitable cell line. For example, the packaging cell line may comprise a mammalian cell line. In some embodiments, the packaging cell line may include, but is not limited to, a Human Bone Osteosarcoma Epithelial (U2OS) cell line, a Baby Hamster Kidney (BHK) cell line, a Human Embryonic Kidney (HEK 293) cell line, Henrietta Lacks (HeLa) cell line, Madin-Darby canine kidney (MDCK) cell line, Chinese hamster ovary (CHO) cell line, A549 lung carcinoma cell line, OVCAR3 human ovarian carcinoma cell line, C127 murine mammary tumor cell line, 3T3 mouse fibroblast cell line, U251 MG human glioblastoma cell line, SCC-4 human tongue squamous carcinoma cell line, nuclear-RFP transduced SK-OV-3 tumor cell line, Bowes human melanoma cell line, monkey COS-7 cell line, dhfr gene-deficient CHO cell line, mouse L cell line, mouse AtT-20 cell line, mouse myeloma cell line, rat GH3 cell line, human FL cell line, pluripotent stem cells such as iPS cell, ES cell and the like of human and other mammals, and primary cultured cells prepared from various tissues, or an African Green Monkey Kidney (Vero) cell line. In some embodiments, the packaging cell line may comprise a U2OS cell line. In some embodiments, the packaging cell line may comprise U2OS cells comprising ICP4, ICP27, ICP0, ICP22, ICP34.5, VP16, or a combination thereof. In some embodiments, the packaging cell line may comprise U2OS cells comprising ICP4 and ICP27 genes (U2OS-4/27). In some embodiments, the packaging cell line may comprise U2OS cells comprising ICP0, ICP4, and ICP27 genes (U2OS-0-4/27). In some embodiments, the packaging cell line may comprise U2OS cells comprising UL1, UL2, UL3, UL4, ULS. UL6, UL7, UL8, UL9, UL10, UL11, UL12, UL13, UL14, UL15, UL16, UL17, UL18, UL19, UL20, UL21, UL22, UL23, UL24, UL25, UL26, UL26.5, UL27, UL28, UL29, UL30, UL31, UL32, UL33, UL34, UL35, UL36, UL37, UL38, UL39, UL40, UL41, UL42, UL43, UL44, UL45, UL46, UL47, UL49, UL49A, UL50, UL51, UL52, UL53, UL55, UL56, US1, US2, US3, US4, US5, US6, US7, US8, US9, US10, US11, US12, or a combination thereof. In some embodiments, the packaging cell line may comprise U2OS cells comprising UL19, UL20, UL21, UL22, UL23, UL24, UL25, UL26, UL26.5, UL27, UL28, UL29, UL30, UL31, UL32, UL33, UL34, UL35, UL36, UL37, UL38, UL39, UL40, UL41, UL42, UL43, UL44, UL45, UL46, UL47, UL49, UL49A, UL50, UL51, UL52, UL53, UL55, UL56, US1, US2, US3, US4, US5, US6, US7, US8, US9, US10, US11, or a combination thereof. In some embodiments, the packaging cell line may comprise U2OS cells comprising UL19, UL20, UL21, UL22, UL23, UL24, UL25, UL26, UL26.5, UL27, UL28, UL29, UL30, UL31, UL32, UL33, UL34, UL35, UL36, UL37, UL38, UL39, UL40, UL41, UL42, UL43, UL44, UL45, UL46, UL47, UL49, UL49A, UL50, UL51, UL52, UL53, UL55, UL56, US1, US2, US3, US4, US5, US6, US7, US8, US9, US10, and US11. In some embodiments, the packaging cell line may comprise U2OS cells comprising UL19, UL20, UL21, or a combination thereof. In some embodiments, the packaging cell line may comprise U2OS cells comprising UL19, UL20, and UL21. In some embodiments, the packaging cell line may comprise U2OS cells comprising UL19, UL20, UL21, UL41, or a combination thereof. In some embodiments, the packaging cell line may comprise U2OS cells comprising UL19, UL20, UL21, and UL41.

[0052] In some aspects, nucleic acid sequence described herein may be introduced or inserted into a genomic safe harbor of the genome. As used herein, genomic safe harbors (GSH) refers to sites in the genome that are able to accommodate the integration of new genetic material in a manner that ensure that the newly inserted genetic elements: (i) function predictably, and/or (ii) do not cause alternations of the host genome that may pose a risk to the host cell organism. As such, genomic safe harbors may be used as sites for transgene insertion for functional genetics studies and therapeutic applications (e.g., gene therapy). Examples of genomic safe harbors in human include, but are not limited to, the adeno-associated virus site 1 (AAVS1), the chemokine (C—C motif) receptor 5 (CCR5) gene, a hypoxanthine phosphoribosyltransferase 1 (HPRT) locus, and the human ortholog of the mouse Rosa26 locus (or Rosa26 homolog locus). See Papapetrou and A. Schambach, Molecular Therapy 24 (4): 678-684 (2016). In some embodiments, the first nucleic acid sequence or the second nucleic acid sequence may be inserted in a first genomic safe harbor site (GSH1) of the recombinant genome. In some embodiments, the first genomic safe harbor site may comprise an AAVS1 locus, CCR5 locus, HPRT locus, or Rosa26 homolog locus. In some embodiments, the first genomic safe harbor site may comprise a Rosa26 homolog locus. In some embodiments, the first nucleic acid sequence or second nucleic acid sequence may be inserted in a second genomic safe harbor site (GSH2) of the recombinant genome. In some embodiments, the second genomic safe harbor may comprise an AAVS1 locus, CCR5 locus, HPRT locus, or Rosa26 homolog locus. In some embodiments, the second genomic safe harbor may comprise an AAVS1 locus.

[0053] In some embodiments, recombinase mediated cassette exchange (RMCE) may be used to integrate any of the nucleic acid sequence described herein into the genome of a packaging cell line to generate a recombinant genome. RMCE is a process in which site-specific recombinases exchange one gene cassette flanked by a pair of incompatible target sites for another cassette flanked by an identical pair of sites. Typically, one cassette is present in the host genome, whereas the other gene cassette is introduced into the host cell by chemical or biological means. RMCE uses recombinases (including, but not limited to, Cre or Flp recombinase) and 2 incompatible recombinase recognition sites (including, but not limited to, Cre or Flp recognition sites). For a non-limiting example, a Cre recombinase and the incompatible recognition sites loxP and lox2272 may be used.

[0054] A RMCE landing pad approach called Recombinase Writing of Iterative DNA and Trap Excision (REWRITE) can enable integrating large DNA sequence into host cells. Based on the REWRITE approach, a DNA construct may be integrated into a genome by contacting the genome with one or more agents configured to cleave the genome at a locus (e.g., genomic safe harbors), integrating a landing pad sequence into the genome at the locus, and integrating one or more cargo sequences (e.g., first nucleic acid sequence or second nucleic acid sequence) into the landing pad sequence, thereby integrating the DNA construct into the genome and generating a recombinant genome.

[0055] A landing pad sequence as described herein may comprise a recombinase recognition site, and may further comprise a gene (e.g., a gene encoding a recombinase and/or a gene encoding a selective marker such as a fluorescent protein), a regulatory element, or a combination thereof. In some embodiments, a landing pad sequence may comprise a nucleic acid sequence with at least 50%, at least 55%, at least 60%, at least 65%, at least 70%, at least 75%, at least 80%, at least 85%, at least 90%, at least 91%, at least 92%, at least 93%, at least 94%, at least 95%, at least 96%, at least 97%, at least 98%, at least 98.5%, at least 98.6%, at least 98.7%, at least 98.8%, at least 98.9%, at least 99%, at least 99.1%, at least 99.2%, at least 99.3%, at least 99.4%, at least 99.5%, at least 99.6%, at least 99.7%, at least 99.8%, at least 99.8%, at least 99.9%, or 100% sequence identity to SEQ ID NO: 4. In some embodiments, a landing pad sequence may comprise a sequence comprising SEQ ID NO: 4.

[0056] REWRITE has optimal features allowing for complete portability to any mammalian cells; any place in the genome including, but not limited to, silenced regions; allows for sequential integration of large DNA constructs towards the megabase scale; and includes a self-excising selection cassette for rapid and seamless removal of genetic scars, including but not limited to selectable markers. Site-specific nucleases (SSNs) or homology-directed recombination (HR) can be used to place REWRITE landing pad. SSN may comprise meganucleases, zinc-finger nucleases (ZFN), TAL effector nucleases (TALENs), or clustered regularly interspaced short palindromic repeats (CRISPR)/CRISPR-associated (Cas) system.

[0057] In another aspect, the present disclosure provides a method of producing a packaging cell line comprising introducing into a cell comprising a genome: (a) a first nucleic acid sequence comprising one or more HSV Class I genes of any embodiment disclosed above, and/or (b) a second nucleic acid sequence comprising one or more HSV Class I and Class II genes of any embodiment disclosed above. In another aspect, the present disclosure provides a method of producing a packaging cell line comprising introducing into a cell comprising a genome: (a) a first nucleic acid sequence comprising one or more HSV Class I genes and Class II genes of any embodiment disclosed above, and/or (b) a second nucleic acid sequence comprising one or more HSV Class I genes of any embodiment disclosed above.

[0058] Methods for introducing into a cell comprising a genome a heterologous gene to generate a recombinant genome are well-known to a person of ordinary skill in the art.

[0059] In some embodiments, the introducing may comprise (i) a recombination mediated cassette exchange; (ii) a homology directed repair; or (iii) a random integration.

[0060] In some embodiments, site-specific nucleases (SSNs) or homology-directed recombination (HR) can be used to insert any of nucleic acid sequence described herein into a recombinant genome. In some embodiments, HR can be used utilizing an endogenous homologous recombination machinery.

[0061] In some embodiments, SSNs may comprise meganucleases, zinc-finger nucleases (ZFN), TAL effector nucleases (TALENs), or clustered regularly interspaced short palindromic repeats (CRISPR)/CRISPR-associated (Cas) system. These four major classes of gene-editing techniques, namely, meganucleases, ZFNs, TALENs, CRISPR/Cas systems share a common mode of action in binding a user-defined sequence of DNA and mediating a double-stranded DNA break (DSB). DSB may then be repaired by HR, an event that introduces the homologous sequence from a donor DNA fragment, or by non-homologous end joining (NHEJ), when there is no donor DNA present.

[0062] In some embodiments, a CRISPR-Cas system may be used with a guide target sequence for genetic screening, targeted transcriptional regulation, targeted knock-in, and/or targeted genome editing, including base editing, epigenetic editing, and/or introducing double strand breaks (DSBs) for homologous recombination-mediated insertion of a nucleotide sequence. CRISPR-Cas system may comprise an endonuclease protein whose DNA-targeting specificity and cutting activity can be programmed by a short guide RNA or a duplex crRNA/TracrRNA. A CRISPR endonuclease may comprise a caspase effector nuclease, typically microbial Cas9 and a short guide RNA (gRNA) or an RNA duplex comprising a 18 to 20 nucleotide targeting sequence that directs the nuclease to a location of interest in the genome. Genome editing can refer to the targeted modification of a DNA sequence, including but not limited to, adding, removing, replacing, or modifying existing DNA sequences, and inducing chromosomal rearrangements or modifying transcription regulation elements (e.g., methylation/demethylation of a promoter sequence of a gene) to alter gene expression. As described above CRISPR-Cas system may require a guide system that can locate Cas protein to the target DNA site in the genome. In some instances, the guide system comprises a crispr RNA (crRNA) with a 17-20 nucleotide sequence that is complementary to a target DNA site and a trans-activating crRNA (tracrRNA) scaffold recognized by the Cas protein (e.g., Cas9). The 17-20 nucleotide sequence complementary to a target DNA site is referred to as a spacer while the 17-20 nucleotide target DNA sequence is referred to a protospacer. While crRNAs and tracrRNAs exist as two separate RNA molecules in nature, single guide RNA (sgRNA or gRNA) can be engineered to combine and fuse crRNA and tracrRNA elements into one single RNA molecule. Thus, in one embodiment, the gRNA may comprise two or more RNAs, e.g., crRNA and tracrRNA. In another embodiment, the gRNA may comprise a sgRNA comprising a spacer sequence for genomic targeting and a scaffold sequence for Cas protein binding. In some instances, the guide system may naturally comprise a sgRNA. For example, Cas12a/Cpf1 utilizes a guide system lacking tracrRNA and comprising only a crRNA containing a spacer sequence and a scaffold for Cas12a/Cpf1 binding. While the spacer sequence can be varied depending on a target site in the genome, the scaffold sequence for Cas protein binding can be identical for all gRNAs.

[0063] CRISPR-Cas systems described herein can comprise different CRISPR enzymes. For example, the CRISPR-Cas system can comprise Cas9, Cas12a/Cpf1, Cas12b/C2c1, Cas12c/C2c3, Cas12d/CasY, Cas12e/CasX, Cas12g, Cas12h, or Cas12i. In some non-limiting example embodiments, Cas enzymes include, but are not limited to, Cas1, Cas1B, Cas2, Cas3, Cas4, Cas5, Cas5d, Cas5t, Cas5h, Cas5a, Cas6, Cas7, Cas8, Cas8a, Cas8b, Cas8c, Cas9 (also known as Csn1 or Csx12), Cas10, Cas10d, Cas12a/Cpf1, Cas12b/C2c1, Cas12c/C2c3, Cas12d/CasY, Cas12e/CasX, Cas12f/Cas14/C2c10, Cas12g, Cas12h, Cas12i, Cas12k/C2c5, Cas13a/C2c2, Cas13b, Cas13c, Cas13d, C2c4, C2c8, C2c9, Csy1, Csy2, Csy3, Csy4, Cse1, Cse2, Cse3, Cse4, Cse5e, Csc1, Csc2, Csa5, Csn1, Csn2, Csm1, Csm2, Csm3, Csm4, Csm5, Csm6, Cmr1, Cmr3, Cmr4, Cmr5, Cmr6, Csb1, Csb2, Csb3, Csx17, Csx14, Csx10, Csx16, CsaX, Csx3, Csx1, Csx1S, Csx11, Csf1, Csf2, CsO, Csf4, Csd1, Csd2, Cst1, Cst2, Csh1, Csh2, Csa1, Csa2, Csa3, Csa4, Csa5, GSU0054, Type II Cas effector proteins, Type V Cas effector proteins, Type VI Cas effector proteins. CARF, DinG, homologues thereof, or modified or engineered versions thereof such as dCas9 (endonuclease-dead Cas9) and nCas9 (Cas9 nickase that has inactive DNA cleavage domain). In some cases, the compositions, methods, devices, and systems, described herein, may use the Cas9 nuclease from Streptococcus pyogenes, of which amino acid sequences and structures are well known to those skilled in the art.

[0064] In some embodiments, (ii) the homology directed repair may comprise (a) a homology directed repair following a targeted double strand break generated by an endonuclease or (b) a homology directed repair with long homology arms and naturally occurring double strand breaks. In some embodiments, the endonuclease may comprise a Clustered regularly interspaced short palindromic repeats (CRISPR)-CRISPR-associated protein 9 (Cas9), Cas3, Cpf1, a zinc finger nuclease, or a transcription activator-like effector nuclease (TALEN). In some embodiments, the homology directed repair with long homology arms and naturally occurring double strand breaks may further comprise selection with a marker. In some embodiments, (iii) the random integration may further comprise a selection with a marker. In any of the above embodiments, the marker may comprise LacZ (encoding beta-galactosidase). CAT (encoding chloramphenicol acetyltransferase), PIGA (encoding phosphatidylinositol glycan anchor biosynthesis class A), HPRT1 (encoding hypoxanthine phosphoribosyltransferase 1), a bioluminescent oxidative enzyme-encoding gene (e.g., firefly luciferase, renilla luciferase, and analogs thereof such as AkaLumine-HCl, CycLuc1), a fluorescent protein-encoding gene (e.g., GFP, YFP, RFP such as mCherry, and analogues thereof such as iRFP, EGFP), or a resistance gene of blasticidin, neomycin/G418, hygromycin, puromycin, or zeocin. In some embodiments, the marker may be under the control of a eukaryotic promoter, such as a constitutive mammalian promoter. For example, the marker may be under the control of an SV40. RSV, CMV, ubiquitin C (UbC), CAG, or Beta-actin promoter. In some embodiments, the marker may be under the control of an HSV promoter. For example, the marker may be under the control of an HSV Class I gene promoter or an HSV Class II gene promoter. In some embodiments, the marker may comprise a Flag-tagged luciferase. In some embodiments, the Flag-tagged luciferase expression may be under the control of CAG promoter. In some embodiments, the marker may comprise a GFP. In some embodiments, the GFP expression may be under the control of an oriS+IE4/5 promoter. In some embodiments, the first nucleic acid sequence or the second nucleic acid sequence described herein can comprise one or more genes encoding a marker described above.

[0065] In some embodiments, the first nucleic acid sequence comprising one or more HSV Class I genes and/or regulatory elements described herein; and/or the second nucleic acid sequence comprising one or more HSV Class I and Class II genes and/or regulatory elements described herein may be comprised in a vector. In some embodiments, the first nucleic acid sequence comprising one or more HSV Class I genes and Class II genes and/or regulatory elements described herein; and/or the second nucleic acid sequence comprising one or more HSV Class I genes and/or regulatory elements described herein may be comprised in a vector. Examples of a vector may include, but are not limited to, a DNA vector, an RNA vector, a plasmid, a lentivirus vector, adenoviral vector, a Rous sarcoma viral (RSV) vector, an HSV vector, and a retrovirus vector. For a non-limiting example, the gene of interest (e.g., genes comprised in the first nucleic acid sequence and/or the second nucleic acid sequence as disclosed herein) with a selectable marker may be subcloned into a lentiviral vector. The host or packaging cell can be infected with the lentiviral vector, and selected for expression of the marker (e.g., blasticidin or zeocin resistance). Expression of the gene-of-interest (e.g., HSV Class I and/or Class I gene products) may be confirmed by any suitable methods or assays in the art (e.g., PCR or RNAseq). The packaging cell line comprising a recombinant genome of the present technology may be propagated and cloned to provide a clonal population.

[0066] In some aspects, the present disclosure provides a composition comprising the recombinant genome of any one of embodiments described herein. For example, the present disclosure provides a composition comprising a recombinant genome comprising a first nucleic acid sequence comprising one or more Herpes Simplex Virus (HSV) Class I genes described herein; and/or a second nucleic acid sequence comprising one or more HSV Class I and Class II genes described herein. For example, the present disclosure provides a composition comprising a recombinant genome comprising a first nucleic acid sequence comprising one or more Herpes Simplex Virus (HSV) Class I genes and Class II genes described herein; and/or a second nucleic acid sequence comprising one or more HSV Class I genes described herein. In some embodiments, the recombinant genome may not comprise a nucleic acid sequence comprising an HSV origin of replication (ori), an HSV packaging signal (pac). In some embodiments, the recombinant genome may not comprise a nucleic acid sequence comprising oriL/S.

[0067] In some embodiments, the first nucleic acid sequence or the second nucleic acid sequence comprising one or more HSV Class I genes or gene cassettes may comprise a homology arm sequence that is homologous to a sequence of a genomic safe harbor site, a Tet-on promoter sequence, a ICP0 gene, a ICP4 gene, and/or a ICP27 gene. In this embodiment, the expression of the ICP0 gene, the ICP4 gene, and/or the ICP27 gene may be under the control of Tet-On promoter. In some embodiments, the first nucleic acid sequence or the second nucleic acid sequence may comprise the ICP0 gene, the ICP4 gene, and/or the ICP27 gene separated by a 2A cleavage signal sequence. In some embodiments, the 2A cleavage signal sequence may comprise P2A, E2A, F2A, or T2A cleavage signal sequence. In some embodiments, the first nucleic acid sequence or the second nucleic acid sequence may comprise a sequence with at least 50%, at least 55%, at least 60%, at least 65%, at least 70%, at least 75%, at least 80%, at least 85%, at least 90%, at least 91%, at least 92%, at least 93%, at least 94%, at least 95%, at least 96%, at least 97%, at least 98%, at least 98.5%, at least 98.6%, at least 98.7%, at least 98.8%, at least 98.9%, at least 99%, at least 99.1%, at least 99.2%, at least 99.3%, at least 99.4%, at least 99.5%, at least 99.6%, at least 99.7%, at least 99.8%, at least 99.8%, at least 99.9%, or 100% sequence identity to a nucleic acid sequence of SEQ ID NO: 2. In some embodiments, the first nucleic acid sequence or the second nucleic acid sequence may comprise a sequence comprising SEQ ID NO: 2.

[0068] In some embodiments, the first nucleic acid sequence or the second nucleic acid sequence comprising one or more HSV Class I genes or gene cassettes may comprise a homology arm sequence that is homologous to a sequence of a genomic safe harbor site, a Tet-on promoter sequence, a ICP0 gene sequence, a ICP4 gene sequence, and/or a ICP27 gene sequence. In some embodiments, the first nucleic acid sequence or the second nucleic acid sequence may comprise the ICP0 gene, the ICP4 gene, and/or the ICP27 gene separated by a 2A cleavage signal sequence. In some embodiments, the 2A cleavage signal sequence may comprise P2A, E2A, F2A, or T2A cleavage signal sequence. In some embodiments, the ICP0 gene sequence, the ICP4 gene sequence, and/or the ICP27 gene sequence may further comprise a sequence encoding a tag downstream or at the 3′ end of the gene sequence. In some embodiments, ICP0, ICP4, and/or ICP27 protein may have a tag at the C-terminus, when translated. In some embodiments, the tag at the C-terminus can be used to sequester ICP0, ICP4, and/or ICP27 proteins in the cytoplasm until an agent is introduced. In some embodiments, the agent may comprise estrogen. In some embodiments, the first nucleic acid sequence or the second nucleic acid sequence may comprise a sequence with at least 50%, at least 55%, at least 60%, at least 65%, at least 70%, at least 75%, at least 80%, at least 85%, at least 90%, at least 91%, at least 92%, at least 93%, at least 94%, at least 95%, at least 96%, at least 97%, at least 98%, at least 98.5%, at least 98.6%, at least 98.7%, at least 98.8%, at least 98.9%, at least 99%, at least 99.1%, at least 99.2%, at least 99.3%, at least 99.4%, at least 99.5%, at least 99.6%, at least 99.7%, at least 99.8%, at least 99.8%, at least 99.9%, or 100% sequence identity to a nucleic acid sequence of SEQ ID NO: 3. In some embodiments, the first nucleic acid sequence or the second nucleic acid sequence may comprise a sequence comprising SEQ ID NO: 3.

[0069] In some embodiments, the first nucleic acid sequence or the second nucleic acid sequence comprising one or more HSV Class I genes or gene cassettes may comprise a homology arm sequence that is homologous to a sequence of genomic safe harbor site, a Tet-on promoter sequence, a ICP0 gene, a ICP4 gene, a ICP27 gene, and/or a VP16 gene. In this embodiment, the expression of the ICP0 gene, the ICP4 gene, the ICP27 gene, and/or VP16 gene may be under the control of Tet-On promoter. In some embodiments, the ICP0 gene, the ICP4 gene, and/or the ICP27 gene may be codon-optimized. In some embodiments, the first nucleic acid sequence or the second nucleic acid sequence may comprise the ICP0 gene, the ICP4 gene, and/or the ICP27 gene separated by a 2A cleavage signal sequence. In some embodiments, the 2A cleavage signal sequence may comprise P2A, E2A, F2A, or T2A cleavage signal sequence. In some embodiments, the first nucleic acid sequence or the second nucleic acid sequence comprising one or more HSV Class I genes may comprise a sequence with at least 50%, at least 55%, at least 60%, at least 65%, at least 70%, at least 75%, at least 80%, at least 85%, at least 90%, at least 91%, at least 92%, at least 93%, at least 94%, at least 95%, at least 96%, at least 97%, at least 98%, at least 98.5%, at least 98.6%, at least 98.7%, at least 98.8%, at least 98.9%, at least 99%, at least 99.1%, at least 99.2%, at least 99.3%, at least 99.4%, at least 99.5%, at least 99.6%, at least 99.7%, at least 99.8%, at least 99.8%, at least 99.9%, or 100% sequence identity to a nucleic acid sequence of SEQ ID NO: 7. In some embodiments, the first nucleic acid sequence or the second nucleic acid sequence may comprise a sequence comprising SEQ ID NO: 7.

[0070] In some embodiments, the first nucleic acid sequence or the second nucleic acid sequence comprising one or more HSV Class I genes or gene cassettes may comprise a homology arm sequence that is homologous to a sequence of genomic safe harbor site, a Tet-on promoter sequence, a ICP0 gene, a ICP4 gene, and/or a ICP27 gene. In this embodiment, the expression of the ICP0 gene, the ICP4 gene, and/or the ICP27 gene may be under the control of Tet-On promoter. In some embodiments, the ICP0 gene, the ICP4 gene, and/or the ICP27 gene may be codon-optimized. In some embodiments, the first nucleic acid sequence or the second nucleic acid sequence may comprise the ICP0 gene, the ICP4 gene, and/or the ICP27 gene separated by a 2A cleavage signal sequence. In some embodiments, the 2A cleavage signal sequence may comprise P2A, E2A, F2A, or T2A cleavage signal sequence. In some embodiments, the first nucleic acid sequence or the second nucleic acid sequence comprising one or more HSV Class I genes may comprise a sequence with at least 50%, at least 55%, at least 60%, at least 65%, at least 70%, at least 75%, at least 80%, at least 85%, at least 90%, at least 91%, at least 92%, at least 93%, at least 94%, at least 95%, at least 96%, at least 97%, at least 98%, at least 98.5%, at least 98.6%, at least 98.7%, at least 98.8%, at least 98.9%, at least 99%, at least 99.1%, at least 99.2%, at least 99.3%, at least 99.4%, at least 99.5%, at least 99.6%, at least 99.7%, at least 99.8%, at least 99.8%, at least 99.9%, or 100% sequence identity to a nucleic acid sequence of SEQ ID NO: 8. In some embodiments, the first nucleic acid sequence or the second nucleic acid sequence may comprise a sequence comprising SEQ ID NO: 8.

[0071] In some embodiments, the first nucleic acid sequence or the second nucleic acid sequence may comprise a homology arm sequence that is homologous to a sequence of genomic safe harbor site and a landing pad sequence. In some embodiments, the landing pad sequence may be designed to accept one or more Class II HSV genes or gene cassettes. In some embodiments, the first nucleic acid sequence or the second nucleic acid sequence may comprise a sequence with at least 50%, at least 55%, at least 60%, at least 65%, at least 70%, at least 75%, at least 80%, at least 85%, at least 90%, at least 91%, at least 92%, at least 93%, at least 94%, at least 95%, at least 96%, at least 97%, at least 98%, at least 98.5%, at least 98.6%, at least 98.7%, at least 98.8%, at least 98.9%, at least 99%, at least 99.1%, at least 99.2%, at least 99.3%, at least 99.4%, at least 99.5%, at least 99.6%, at least 99.7%, at least 99.8%, at least 99.8%, at least 99.9%, or 100% sequence identity to a nucleic acid sequence of SEQ ID NO: 4. In some embodiments, the first nucleic acid sequence or the second nucleic acid sequence may comprise a sequence comprising SEQ ID NO: 4.

[0072] In some embodiments, the first nucleic acid sequence or the second nucleic acid sequence comprising one or more HSV Class I genes and one or more HSV Class II genes may comprise one or more HSV Class II genes or gene cassettes. In some embodiments, the first nucleic acid sequence or the second nucleic acid sequence comprising one or more HSV Class II genes may comprise UL 1, UL2, UL3, UL4, UL5, UL6, UL7, UL8, UL9, UL 10, UL 11, UL 12, UL13, UL14, UL15, UL16, UL17, UL18, UL19, UL20, UL21, UL22, UL23, UL24, UL25, UL26, UL26.5, UL27, UL28, UL29, UL30, UL31, UL32, UL33, UL34, UL35, UL36, UL37, UL38, UL39, UL40, UL41, UL42, UL43, UL44, UL45, UL46, UL47, UL49, UL49A, UL50, UL51, UL52, UL53, UL55, UL56, US1, US2, US3, US4, US5, US6, US7, US8, US9, US10, US11, or US12. In some embodiments, the expression of the one or more HSV Class II genes may be under the control of native promoters of the HSV Class II genes. In some embodiments, the expression of the one or more HSV Class II genes may be under the control of non-native promoters of the HSV Class II genes. In some embodiments, the first nucleic acid sequence or the second nucleic acid sequence comprising one or more HSV Class I genes may comprise a ICP34.5 gene. In some embodiments, the expression of the ICP34.5 gene may be under the control of a CMV promoter. In some embodiments, the first nucleic acid sequence or the second nucleic acid sequence may not comprise on and/or pac sequences. In some embodiments, the first nucleic acid sequence or the second nucleic acid sequence may comprise a sequence with at least 50%, at least 55%, at least 60%, at least 65%, at least 70%, at least 75%, at least 80%, at least 85%, at least 90%, at least 91%, at least 92%, at least 93%, at least 94%, at least 95%, at least 96%, at least 97%, at least 98%, at least 98.5%, at least 98.6%, at least 98.7%, at least 98.8%, at least 98.9%, at least 99%, at least 99.1%, at least 99.2%, at least 99.3%, at least 99.4%, at least 99.5%, at least 99.6%, at least 99.7%, at least 99.8%, at least 99.8%, at least 99.9%, or 100% sequence identity to a nucleic acid sequence of SEQ ID NO: 5. In some embodiments, the first nucleic acid sequence or the second nucleic acid sequence may comprise a sequence comprising SEQ ID NO: 5.

[0073] In some embodiments, the first nucleic acid sequence or the second nucleic acid sequence comprising one or more HSV Class I genes and one or more HSV Class II genes may comprise a sequence with at least 50%, at least 55%, at least 60%, at least 65%, at least 70%, at least 75%, at least 80%, at least 85%, at least 90%, at least 91%, at least 92%, at least 93%, at least 94%, at least 95%, at least 96%, at least 97%, at least 98%, at least 98.5%, at least 98.6%, at least 98.7%, at least 98.8%, at least 98.9%, at least 99%, at least 99.1%, at least 99.2%, at least 99.3%, at least 99.4%, at least 99.5%, at least 99.6%, at least 99.7%, at least 99.8%, at least 99.8%, at least 99.9%, or 100% sequence identity to a nucleic acid sequence of SEQ ID NO: 6. In some embodiments, the first nucleic acid sequence or the second nucleic acid sequence may comprise a sequence comprising SEQ ID NO: 6.

[0074] In some embodiments, the first nucleic acid sequence or the second nucleic acid sequence comprising one or more HSV Class I genes and one or more HSV Class II genes may comprise one or more HSV Class II genes or gene cassettes. In some embodiments, the first nucleic acid sequence or the second nucleic acid sequence comprising one or more HSV Class II genes may comprise UL1, UL2, UL3, UL4, UL5, UL6, UL7, UL8, UL9, UL10, UL11, UL12, UL13, UL14, UL15, UL16, UL17, UL18, UL19, UL20, UL21, UL22, UL23, UL24, UL25, UL26, UL26.5, UL27, UL28, UL29, UL30, UL31, UL32, UL33, UL34, UL35, UL36, UL37, UL38, UL39, UL40, UL41, UL42, UL43, UL44, UL45, UL46, UL47, UL49, UL49A, UL50, UL51, UL52, UL53, UL55, UL56, US1, US2, US3, US4, US5, US6, US7, US8, US9, US10, US11, or US12. In some embodiments, the expression of the one or more HSV Class II genes may be under the control of native promoters of the HSV Class II genes. In some embodiments, the expression of the one or more HSV Class II genes may be under the control of non-native promoters of the HSV Class II genes. In some embodiments, the first nucleic acid sequence or the second nucleic acid sequence comprising one or more HSV Class I genes may comprise a ICP34.5 gene, a VP16 gene, or a combination thereof. In some embodiments, the expression of the ICP34.5 gene may be under the control of CMV promoter. In some embodiments, the expression of the VP16 gene may be under the control of Tet-On promoter. In some embodiments, the first nucleic acid sequence or the second nucleic acid sequence may not comprise ori and/or pac sequences. In some embodiments, the first nucleic acid sequence or the second nucleic acid sequence may comprise a sequence with at least 50%, at least 55%, at least 60%, at least 65%, at least 70%, at least 75%, at least 80%, at least 85%, at least 90%, at least 91%, at least 92%, at least 93%, at least 94%, at least 95%, at least 96%, at least 97%, at least 98%, at least 98.5%, at least 98.6%, at least 98.7%, at least 98.8%, at least 98.9%, at least 99%, at least 99.1%, at least 99.2%, at least 99.3%, at least 99.4%, at least 99.5%, at least 99.6%, at least 99.7%, at least 99.8%, at least 99.8%, at least 99.9%, or 100% sequence identity to a nucleic acid sequence of SEQ ID NO: 9. In some embodiments, the first nucleic acid sequence or the second nucleic acid sequence may comprise a sequence comprising SEQ ID NO: 9.

[0075] In some embodiments, the first nucleic acid sequence or the second nucleic acid sequence comprising one or more HSV Class I genes and one or more HSV Class II genes may comprise one or more HSV Class II genes or gene cassettes. In some embodiments, the first nucleic acid sequence or the second nucleic acid sequence comprising one or more HSV Class II genes may comprise UL1, UL2, UL3, UL4, UL5, UL6, UL7, UL8, UL9, UL10, UL11, UL12, UL13, UL14, UL15, UL16, UL17, UL18, UL19, UL20, UL21, UL22, UL23, UL24, UL25, UL26, UL26.5, UL27, UL28, UL29, UL30, UL31, UL32, UL33, UL34, UL35, UL36, UL37, UL38, UL39, UL40, UL41, UL42, UL43, UL44, UL45, UL46, UL47, UL49, UL49A, UL50, UL51, UL52, UL53, UL55, UL56, US1, US2, US3, US4, US5, US6, US7, US8, US9, US10, US11, or US12. In some embodiments, the expression of the one or more HSV Class II genes may be under the control of native promoters of the HSV Class II genes. In some embodiments, the expression of the one or more HSV Class II genes may be under the control of non-native promoters of the HSV Class II genes. In some embodiments, the first nucleic acid sequence or the second nucleic acid sequence comprising one or more HSV Class I genes may comprise a ICP34.5 gene. In some embodiments, the expression of the ICP34.5 gene may be under the control of CMV promoter. In some embodiments, the first nucleic acid sequence or the second nucleic acid sequence may not comprise on and/or pac sequences. In some embodiments, the first nucleic acid sequence or the second nucleic acid sequence may comprise a sequence with at least 50%, at least 55%, at least 60%, at least 65%, at least 70%, at least 75%, at least 80%, at least 85%, at least 90%, at least 91%, at least 92%, at least 93%, at least 94%, at least 95%, at least 96%, at least 97%, at least 98%, at least 98.5%, at least 98.6%, at least 98.7%, at least 98.8%, at least 98.9%, at least 99%, at least 99.1%, at least 99.2%, at least 99.3%, at least 99.4%, at least 99.5%, at least 99.6%, at least 99.7%, at least 99.8%, at least 99.8%, at least 99.9%, or 100% sequence identity to a nucleic acid sequence of SEQ ID NO: 10. In some embodiments, the first nucleic acid sequence or the second nucleic acid sequence may comprise a sequence comprising SEQ ID NO: 10.

[0076] In some embodiments, the first nucleic acid sequence or the second nucleic acid sequence comprising one or more HSV Class II genes may comprise one or more HSV Class II genes or gene cassettes. In some embodiments, the first nucleic acid sequence or the second nucleic acid sequence comprising one or more HSV Class II genes may comprise UL 1, UL2, UL3, UL4, UL5, UL6, UL7, UL8, UL9, UL10, UL11, UL12, UL13, UL14, UL15, UL16, UL17, UL18, UL19, UL20, UL21, UL22, UL23, UL24, UL25, UL26, UL26.5, UL27, UL28, UL29, UL30, UL31, UL32, UL33, UL34, UL35, UL36, UL37, UL38, UL39, UL40, UL41, UL42, UL43, UL44, UL45, UL46, UL47, UL49, UL49A, UL50, UL51, UL52, UL53, UL55, UL56, US1, US2, US3, US4, US5, US6, US7, US8, US9, US10, US11, or US12. In some embodiments, the expression of the one or more HSV Class II genes may be under the control of native promoters of the HSV Class II genes. In some embodiments, the expression of the one or more HSV Class II genes may be under the control of non-native promoters of the HSV Class II genes. In some embodiments, the first nucleic acid sequence or the second nucleic acid sequence may not comprise ori and/or pac sequences. In some embodiments, the first nucleic acid sequence or the second nucleic acid sequence may comprise a sequence with at least 50%, at least 55%, at least 60%, at least 65%, at least 70%, at least 75%, at least 80%, at least 85%, at least 90%, at least 91%, at least 92%, at least 93%, at least 94%, at least 95%, at least 96%, at least 97%, at least 98%, at least 98.5%, at least 98.6%, at least 98.7%, at least 98.8%, at least 98.9%, at least 99%, at least 99.1%, at least 99.2%, at least 99.3%, at least 99.4%, at least 99.5%, at least 99.6%, at least 99.7%, at least 99.8%, at least 99.8%, at least 99.9%, or 100% sequence identity to a nucleic acid sequence of SEQ ID NO: 17. In some embodiments, the first nucleic acid sequence or the second nucleic acid sequence may comprise a sequence comprising SEQ ID NO: 17.

[0077] In another aspect, provided herein is a cell or a cell line comprising the recombinant genome described herein. In some embodiments, the cell or the cell line may comprise a mammalian cell or a mammalian cell line. In some embodiments, the cell or the cell line may comprise a Human Bone Osteosarcoma Epithelial (U2OS) cell, a Baby Hamster Kidney (BHK) cell, a Human Embryonic Kidney (HEK 293) cell, Henrietta Lacks (HeLa) cell line, Madin-Darby canine kidney (MDCK) cell line, Chinese hamster ovary (CHO) cell line, A549 lung carcinoma cell line, OVCAR3 human ovarian carcinoma cell line, C127 murine mammary tumor cell line, 3T3 mouse fibroblast cell line, U251 MG human glioblastoma cell line, SCC-4 human tongue squamous carcinoma cell line, nuclear-RFP transduced SK-OV-3 tumor cell line, Bowes human melanoma cell line, monkey COS-7 cell line, dhfr gene-deficient CHO cell line, mouse L cell line, mouse AtT-20 cell line, mouse myeloma cell line, rat GH3 cell line, human FL cell line, pluripotent stem cells such as iPS cell, ES cell and the like of human and other mammals, and primary cultured cells prepared from various tissues, or an African Green Monkey Kidney (Vero) cell. In some embodiments, the cell or the cell line may comprise U2OS cells comprising ICP4, ICP27, ICP0, ICP22, ICP34.5. VP16, or a combination thereof. In some embodiments, the cell or the cell line may comprise U2OS cells comprising ICP4 and ICP27 genes (U2OS-4/27). In some embodiments, the cell or the cell line may comprise U2OS cells comprising ICP0, ICP4, and ICP27 genes (U2OS-0-4/27). In some embodiments, the cell or the cell line may comprise U2OS cells comprising UL1, UL2, UL3, UL4, UL5, UL6, UL7, UL8, UL9, UL10, UL11, UL12, UL13, UL14, UL15, UL16, UL17, UL18, UL19, UL20, UL21, UL22, UL23, UL24, UL25, UL26, UL26.5, UL27, UL28, UL29, UL30, UL31, UL32, UL33, UL34, UL35, UL36, UL37, UL38, UL39, UL40, UL41, UL42, UL43, UL44, UL45, UL46, UL47, UL49, UL49A, UL50, UL51, UL52, UL53, UL55, UL56, US1, US2, US3, US4, US5, US6, US7, US8, US9, US10, US11, US12, or a combination thereof. In some embodiments, the cell or the cell line may comprise U2OS cells comprising UL19, UL20, UL21, UL22, UL23, UL24, UL25, UL26, UL26.5, UL27, UL28, UL29, UL30, UL31, UL32, UL33, UL34, UL35, UL36, UL37, UL38, UL39, UL40, UL41, UL42, UL43, UL44, UL45, UL46, UL47, UL49, UL49A, UL50, UL51, UL52, UL53, UL55, UL56, US1, US2, US3, US4, US5, US6, US7, US8, US9, US10, US11, or a combination thereof. In some embodiments, the cell or the cell line may comprise U2OS cells comprising UL19, UL20, UL21, UL22, UL23, UL24, UL25, UL26, UL26.5, UL27, UL28, UL29, UL30, UL31, UL32, UL33, UL34, UL35, UL36, UL37, UL38, UL39, UL40, UL41, UL42, UL43, UL44, UL45, UL46, UL47, UL49, UL49A, UL50, UL51, UL52, UL53, UL55, UL56, US1, US2, US3, US4, US5, US6, US7, US8, US9, US10, and US11. In some embodiments, the cell or the cell line may comprise U2OS cells comprising UL19, UL20, UL21, or a combination thereof. In some embodiments, the cell or the cell line may comprise U2OS cells comprising UL19, UL20, and UL21. In some embodiments, the cell or the cell line may comprise U2OS cells comprising UL19, UL20, UL21, UL41, or a combination thereof. In some embodiments, the cell or the cell line may comprise U2OS cells comprising UL19, UL20, UL21, and UL41.

### Production of Herpes Simplex Virus (HSV) Amplicon Particles

[0078] In another aspect, the present disclosure provides a system for producing a HSV amplicon particle comprising (a) the packaging cell line of any one of the above embodiments; and (b) an amplicon vector of any one of the above embodiments.

[0079] An example workflow of HSV amplicon particle production can be as follows (FIG. 1). An HSV amplicon vector is prepared. The HSV amplicon may comprise 10-150 kb of DNA payload (e.g., a transgene or a gene-of-interest, and/or regulatory elements such as an enhancer, a promoter, or a terminator, etc.), HSV origin of replication (ori), packaging (pac) sequences, one or more HSV class I genes, one or more HSV class II gene, and/or a marker. The HSV amplicon vector can be introduced into the HSV packaging cell line described herein by transfection using any method known to the skilled in the art or described herein. The HSV packaging cell line can have HSV Class I genes and/or HSV Class II genes inserted at 2 distinct genomic safe harbor (GSH) sites on different chromosomes. These are denoted as GSH 1 (yellow) and GSH 2 (orange) in FIG. 1. For example, HSV Class I genes can be inserted at GSH 1. For example, HSV Class II genes can be inserted at GSH 2. When the HSV amplicon is introduced into the HSV packaging cell line, HSV amplicon particles can be produced and isolated for applications.

[0080] In some embodiments, the amplicon vector of the present technology may comprise an amplicon plasmid comprising ori/pac sequences and a plasmid backbone, or minicircle DNA comprising ori/pac sequences. The on and pac sequences of the amplicon vector for use in the amplicon vector may be any suitable ori/pac sequences. The on/pac sequences may be placed into the amplicon vector in any suitable locations. In particular, the origin of replication may be any suitable origin of replication that allows for replication of the amplicon vector in the packaging cell line used for replication and packaging of the amplicon vector into the HSV amplicon particles. In some embodiments, origin of replication signals from HSV-1 or HSV-2 may be used. In some embodiments, the amplicon vector may comprise an HSV vector. For example, a replication deficient HSV vector may be used.

[0081] The pac sequence for use in the amplicon vector may be any suitable pac sequence, such that the amplicon vector can be packaged into a HSV amplicon particle that is capable of adsorbing to a cell or that can be transformed or transduced into a cell. Exemplary pac sequences may include, but are not limited to, pac sequences from HSV-1 and HSV-2.

[0082] In some embodiments, the amplicon vector may comprise one or more reporter genes. In some embodiments, the one or more reporter genes may be under the control of a eukaryotic promoter, such as a constitutive mammalian promoter. Examples of reporter genes can include, but are not limited to, LacZ encoding beta-galactosidase, CAT, HPRT1, PIGA, Luciferase, a fluorescent protein, blasticidin, neomycin/G418, hygromycin, puromycin, or zeocin. Examples of the fluorescent protein can include, but are not limited to, GFP, YFP, RFP, and analogues thereof. In some embodiments, an RFP can comprise mCherry. In some embodiments, analogues of GFP, YFP, or RFP can comprise iRFP, EGFP, or the like. Examples of a constitutive mammalian promoter can include, but are not limited to, an SV40, RSV. CMV, ubiquitin C (UbC), CAG, or Beta-actin promoter. In some embodiments, the one or more reporter genes may be under the control of an HSV promoter. For example, the reporter genes may be under the control of an HSV class I gene promoter or an HSV class II gene promoter. In some embodiments, the one or more reporter gene may be under the control of an oriS+IE4/5 promoter. In some embodiments, the amplicon vector may comprise a Flag-tagged luciferase. In some embodiments, the Flag-tagged luciferase expression may be under the control of CAG promoter. In some embodiments, the amplicon vector may comprise a GFP. In some embodiments, the GFP expression may be under the control of an oriS+IE4/5 promoter.

[0083] In some embodiments, the amplicon vector may comprise one or more HSV Class II genes. In some embodiments, the amplicon vector may comprise one or more HSV Class II genes comprising UL1, UL2, UL3, UL4, UL5, UL6, UL7, UL8, UL9, UL10, UL11, UL12, UL13, UL14, UL15, UL16, UL17, UL18, UL19, UL20, UL21, UL22, UL23, UL24, UL25, UL26, UL26.5, UL27, UL28, UL29, UL30, UL31, UL32, UL33, UL34, UL35, UL36, UL37, UL38, UL39, UL40, UL41, UL42, UL43, UL44, UL45, UL46, UL47, UL49, UL49A, UL50, UL51, UL52, UL53, UL55, UL56, US1, US2, US3, US4, US5, US6, US7, US8, US9, US10, US11, US12, or a combination thereof. In some embodiments, the amplicon vector may comprise UL1, UL2, UL3, UL4, UL5, UL6, UL7, UL8, UL9, UL10, UL 11, UL 12, UL13, UL14, UL15, UL16, UL 17, UL 18, UL19, or a combination thereof. In some embodiments, the amplicon vector may comprise one or more HSV Class II genes. In some embodiments, the amplicon vector may comprise UL20, UL21, UL22, UL23, UL24, UL25, UL26, UL26.5, UL27, UL28, UL29, UL30, UL31, UL32, UL33, UL34, UL35, UL36, UL37, UL38, UL39, UL40, UL41, UL42, UL43, UL44, UL45, UL46, UL47, UL49, UL49A, UL50, UL51, UL52, UL53, UL55, UL56, US1, US2, US3, US4, US5, US6, US7, US8, US9, US10, US11, US12, or a combination thereof. In some embodiments, the amplicon vector may comprise a mutation in or deletion of one or more HSV Class II genes. In one embodiment, an amplicon vector may comprise a mutation in or deletion of UL19, UL20, UL21, or a combination thereof. In another embodiment, an amplicon vector may comprise a mutation in or deletion of UL19, UL20, UL21, UL41, or a combination thereof. In some embodiments, HSV vectors may comprise a mutation in or deletion of UL19, UL20, and UL21. In some embodiments, HSV vectors may comprise a mutation in or deletion of UL19, UL20, UL21, and UL41.

[0084] In some embodiments, the amplicon vector may comprise one or more HSV Class I genes. In some embodiments, the amplicon vector may comprise ICP4, ICP27, ICP0, ICP22, ICP34.5, VP16, or a combination thereof. In one embodiment, an amplicon vector may comprise ICP4, ICP27. VP16, or a combination thereof. In another embodiment, an amplicon vector may comprise ICP4, ICP27, or a combination thereof. In yet another embodiment, an amplicon vector may comprise VP16. In some embodiments, an amplicon vector may comprise ICP4, ICP27, and VP16. In some embodiments, an amplicon vector may comprise ICP4, and ICP27.

[0085] In some embodiments, the amplicon vector comprises a sequence with at least 50% sequence identity to SEQ ID NO: 1, SEQ ID NO: 11, SEQ ID NO: 12, SEQ ID NO: 13, or SEQ ID NO: 14. In some embodiments, the amplicon vector comprises a sequence comprising SEQ ID NO: 1, SEQ ID NO: 11, SEQ ID NO: 12, SEQ ID NO: 13, or SEQ ID NO: 14.

[0086] In some embodiments, the amplicon vector may comprise a sequence with at least 50% sequence identity to a nucleic acid sequence of SEQ ID NO: 1. In some embodiments, the amplicon vector may comprise a sequence with at least 50%, at least 55%, at least 60%, at least 65%, at least 70%, at least 75%, at least 80%, at least 85%, at least 90%, at least 91%, at least 92%, at least 93%, at least 94%, at least 95%, at least 96%, at least 97%, at least 98%, at least 98.5%, at least 98.6%, at least 98.7%, at least 98.8%, at least 98.9%, at least 99%, at least 99.1%, at least 99.2%, at least 99.3%, at least 99.4%, at least 99.5%, at least 99.6%, at least 99.7%, at least 99.8%, at least 99.8%, at least 99.9%, or 100% sequence identity to a nucleic acid sequence of SEQ ID NO: 1. In some embodiments, the amplicon vector may comprise a sequence comprising SEQ ID NO: 1.

[0087] In some embodiments, the amplicon vector may comprise a sequence with at least 50% sequence identity to a nucleic acid sequence of SEQ ID NO: 11. In some embodiments, the amplicon vector may comprise a sequence with at least 50%, at least 55%, at least 60%, at least 65%, at least 70%, at least 75%, at least 80%, at least 85%, at least 90%, at least 91%, at least 92%, at least 93%, at least 94%, at least 95%, at least 96%, at least 97%, at least 98%, at least 98.5%, at least 98.6%, at least 98.7%, at least 98.8%, at least 98.9%, at least 99%, at least 99.1%, at least 99.2%, at least 99.3%, at least 99.4%, at least 99.5%, at least 99.6%, at least 99.7%, at least 99.8%, at least 99.8%, at least 99.9%, or 100% sequence identity to a nucleic acid sequence of SEQ ID NO: 11. In some embodiments, the amplicon vector may comprise a sequence comprising SEQ ID NO: 11.

[0088] In some embodiments, the amplicon vector may comprise a sequence with at least 50% sequence identity to a nucleic acid sequence of SEQ ID NO: 12. In some embodiments, the amplicon vector may comprise a sequence with at least 50%, at least 55%, at least 60%, at least 65%, at least 70%, at least 75%, at least 80%, at least 85%, at least 90%, at least 91%, at least 92%, at least 93%, at least 94%, at least 95%, at least 96%, at least 97%, at least 98%, at least 98.5%, at least 98.6%, at least 98.7%, at least 98.8%, at least 98.9%, at least 99%, at least 99.1%, at least 99.2%, at least 99.3%, at least 99.4%, at least 99.5%, at least 99.6%, at least 99.7%, at least 99.8%, at least 99.8%, at least 99.9%, or 100% sequence identity to a nucleic acid sequence of SEQ ID NO: 12. In some embodiments, the amplicon vector may comprise a sequence comprising SEQ ID NO: 12.

[0089] In some embodiments, the amplicon vector may comprise a sequence with at least 50% sequence identity to a nucleic acid sequence of SEQ ID NO: 13. In some embodiments, the amplicon vector may comprise a sequence with at least 50%, at least 55%, at least 60%, at least 65%, at least 70%, at least 75%, at least 80%, at least 85%, at least 90%, at least 91%, at least 92%, at least 93%, at least 94%, at least 95%, at least 96%, at least 97%, at least 98%, at least 98.5%, at least 98.6%, at least 98.7%, at least 98.8%, at least 98.9%, at least 99%, at least 99.1%, at least 99.2%, at least 99.3%, at least 99.4%, at least 99.5%, at least 99.6%, at least 99.7%, at least 99.8%, at least 99.8%, at least 99.9%, or 100% sequence identity to a nucleic acid sequence of SEQ ID NO: 13. In some embodiments, the amplicon vector may comprise a sequence comprising SEQ ID NO: 13.

[0090] In some embodiments, the amplicon vector may comprise a sequence with at least 50% sequence identity to a nucleic acid sequence of SEQ ID NO: 14. In some embodiments, the amplicon vector may comprise with a sequence at least 50%, at least 55%, at least 60%, at least 65%, at least 70%, at least 75%, at least 80%, at least 85%, at least 90%, at least 91%, at least 92%, at least 93%, at least 94%, at least 95%, at least 96%, at least 97%, at least 98%, at least 98.5%, at least 98.6%, at least 98.7%, at least 98.8%, at least 98.9%, at least 99%, at least 99.1%, at least 99.2%, at least 99.3%, at least 99.4%, at least 99.5%, at least 99.6%, at least 99.7%, at least 99.8%, at least 99.8%, at least 99.9%, or 100% sequence identity to a nucleic acid sequence of SEQ ID NO: 14. In some embodiments, the amplicon vector may comprise a sequence comprising SEQ ID NO: 14.

[0091] In any of the above embodiments, the amplicon vector may comprise at least one cargo nucleic acid sequence comprising a gene-of-interest or a transgene. In some embodiments, the at least one cargo nucleic acid sequence may comprise from about 10 kb to about 150 kb. For example, the at least one cargo nucleic acid sequence may comprise from about 10 kb to about 20 kb, from about 20 kb to about 30 kb, from about 30 kb to about 40 kb, from about 40 kb to about 50 kb, from about 50 kb to about 60 kb, from about 60 kb to about 70 kb, from about 70 kb to about 80 kb, from about 80 kb to about 90 kb, from about 90 kb to about 100 kb, from 100 about kb to about 110 kb, from about 110 kb to about 120 kb, from about 120 kb to about 130 kb, from about 130 kb to about 140 kb, or from about 140 kb to about 150 kb. In some embodiments, the at least one cargo nucleic acid sequence may comprise up to about 80 kb, up to about 85 kb, up to about 90 kb, up to, about 95 kb, up to about 100 kb, up to about 105 kb, up to about 110 kb, up to about 115 kb, up to about 120 kb, up to about 125 kb, up to about 130 kb, up to about 135 kb, up to about 140 kb, up to about 145 kb, or up to about 150 kb. In some embodiments, the at least one cargo nucleic acid sequence may comprise up to about 100 kb. In some embodiments, the at least one cargo nucleic acid sequence may comprise at least about 10 kb, at least about 15 kb, at least about 20 kb, at least about 25 kb, at least about 30 kb, at least about 35 kb, at least about 40 kb, at least about 45 kb, at least about 50 kb, at least about 55 kb, at least about 60 kb, at least about 65 kb, at least about 70 kb, at least about 75 kb, at least about 80 kb, at least about 85 kb, at least about 90 kb, at least about 95 kb, at least about 100 kb, at least about 105 kb, at least about 110 kb, at least about 115 kb, at least about 120 kb, at least about 125 kb, at least about 130 kb, at least about 135 kb, at least about 140 kb, at least about 145 kb, or at least about 150 kb. In some embodiments, the at least one cargo nucleic acid sequence may comprise about 45 kb.

[0092] Methods for inserting a cargo nucleic acid sequence into an amplicon vector is well-known to a person of ordinary skill in the art. See Annual Review of Biochemistry 89(1): 77-101 (2020). Those methods include, but are not limited to, restriction enzyme digestion cloning, Golden Gate Assembly, in vitro Cas9 digestion followed by Gibson assembly, Gateway cloning, or yeast recombination (or assembly in yeast). For non-limiting examples, the at least one cargo nucleic acid sequence may be inserted site-specifically in the amplicon vector by restriction enzyme digestion cloning, Golden Gate Assembly, in vitro Cas9 digestion followed by Gibson assembly, Gateway cloning, or in yeasto recombination assembly.

[0093] In some embodiments, the at least one cargo nucleic acid sequence may be inserted by restriction enzyme digestion cloning using one or more restriction enzyme sites comprising PacI, BbsI, BbsI-HF, BcoDI, BsaI-HF, BsmBI-v2, BsmI, BspQI, BsrDI, BsrI, BtsI-v2, BtsIMutI, EarI, Esp3I, SapI, AcuI, BaeI, BcgI, BpmI, BpuEI, BsaXI, BseRI, BsgI, BsmFI, BspCNI, BtgZI, CspCI, EcI, I, MmeI, NmeAIII, AlwI, BbvI, BccI, BceAI, BcI, VI, BfuAI, BmrI, BsmAI, BspMI, BtsCI, FauI, FokI, HgaI, HphI, HpyAV, MboII, MlyI, MnlI, PaqCI, PleI, SfaNI, I-CeuI, I-SceI, PI-PspI, PI-SceI, PmeI, or a combination thereof. In some embodiments, the at least one cargo nucleic acid sequences may be inserted site-specifically in the amplicon vector by restriction enzyme digestion cloning. Examples of restriction enzyme site sequences can include, but are not limited to, EcoRV, HindIII, and PstI. In some embodiments, the at least one cargo nucleic acid sequences may be inserted site-specifically in the amplicon vector by Golden Gate Cloning or Golden Gate assembly. In this embodiment, multiple DNA fragments are simultaneously and directionally assembled into a single piece using Type IIS restriction enzymes and T4 DNA ligase. Examples of Type IIS enzymes include, but are not limited to. BsaI, BsmBI, and BbsI.

[0094] Other non-restriction enzyme based DNA assembly methods such as Gibson assembly (following in vitro Cas9 digestion), Gateway cloning, and yeast recombination, may also be used to insert the at least one cargo nucleic acid sequences site-specifically in the amplicon vector. Those methods are well-known to a person of ordinary skill in the art.

[0095] In some embodiments, the at least one cargo nucleic acid sequence may be inserted by Gateway cloning using one or more Gateway cloning sites comprising attR1, attR2, or a combination thereof.

[0096] In some embodiments, the at least one cargo nucleic acid sequence may be inserted by in yeasto recombination assembly using one or more in yeasto recombination sites comprising NeoLVec, NeoRVec, or a combination thereof.

[0097] In some embodiments, the at least one cargo nucleic acid sequence may be inserted by in vitro Cas9 digestion using a Cas9 gRNA sequence followed by Gibson assembly.

[0098] In some embodiments, the at least one cargo nucleic acid sequence may comprise a transgene. In some embodiments, the transgene may comprise a gene editing system such CRISPR/Cas9 or nucleases, such as meganuclease, TALENS, zinc finger nuclease (ZFN), and Cpf1 DNA endonuclease. In some embodiments, the gene editing system may be used for the modification of epigenetic structures to silence genes or induce the expression of silent genes.

[0099] In some embodiments, the transgene may comprise CRISPR associated protein 9 (Cas9), Cas12a, Dystrophin (DYS), amylo-alpha-1, 6-glucosidase, 4-alpha-glucanotransferase (AGL), otoferlin (OTOF), myosin VIIA (MYO7A), ATP binding cassette subfamily A member 4 (ABCA4), coagulation factor VIII (F8), centrosomal protein 290 (CEP290), cadherin related 23 (CDH23), or centrosome, and basal body associated protein (ALMS1).

[0100] In some embodiments, the transgene may comprise a gene encoding one or more prophylactically- or therapeutically-active proteins, polypeptides, or other factors (e.g., non-coding RNA (ncRNA) such as siRNA or miRNA). In some embodiments, the transgene may comprise a gene encoding an agent that can enhance tumor killing activity (such as TRAIL or tumor necrosis factor (TNF)). In some embodiments, the transgene may comprise a gene encoding an agent that can be suitable for the treatment of conditions such as muscular dystrophy (a suitable transgene encodes Dystrophin), cardiovascular disease (suitable transgenes include, e.g., SERCA2a, GATA4, Tbx5, Mef2C, Hand2, Myocd, etc.), neurodegenerative disease (suitable transgenes include, e.g., NGF, BDNF, GDNF, NT-3. Huntingtin, etc.), chronic pain (suitable transgenes encode GlyRa1, an enkephalin, or a glutamate decarboxylase (e.g., GAD65, GAD67, or another isoform), lung disease (e.g., CFTR), or hemophilia (suitable transgenes encode. e.g., Factor VIII or Factor IX).

[0101] In some embodiments, the at least one cargo nucleic acid sequence may further comprise at least one regulatory element comprising an enhancer, a promoter, a terminator, or a combination thereof. In some embodiments, the at least one regulatory element may be a natural regulatory element of a transgene or a gene-of-interest encoded by the at least one cargo nucleic acid sequence. For example, the at least one cargo nucleic acid sequence may comprise a transgene or a gene-of-interest and its natural regulatory element sequence (e.g., an enhancer sequence, a promoter sequence, a terminator sequence, or a combination thereof). In some embodiments, the at least one cargo nucleic acid sequence may further comprise a sequence that is upstream or 5′ end of a transgene or a gene-of-interest in the genome (e.g., in its natural genomic context) and/or a sequence that is downstream or 3′ end of a transgene or a gene-of-interest in the genome (e.g., in its natural genomic context).

[0102] In some embodiments, the at least one cargo nucleic acid sequence may comprise a promoter. The promoter may be any promoter desired to control/regulate the expression of the at least one cargo nucleic acid sequence. In some embodiments, the promoter may comprise a natural promoter for a transgene or a gene-of-interest encoded by the at least one cargo nucleic acid sequence. In some embodiments, the at least one cargo nucleic acid sequence may further comprise a sequence that is upstream or 5′ end of a transgene or a gene-of-interest in the genome (e.g., in its natural genomic context). In some embodiments, the promoter may comprise a non-natural promoter. For example, the promoter may be from another gene for cell-specific or tissue-specific expression. For example, the promoter may be an inducible promoter for inducible expression. Exemplary promoters include but are not limited to a cell-specific or tissue-specific promoter (e.g., EOS, OCT4, Nanog, SOX2 (for neural stem cells), aMHC, Brachyury, Tau, GFAP, NSE, Synapsin I (for neurons), Apo A-I, Albumin, ApoE (for liver), MCK, SMC a-Actin, Myosin heavy chain, Myosin light chain (for muscle), etc.), such as a promoter that specifically or preferentially expresses genes in a defined cell type (e.g., within a liver cell, lung cell, epithelial cell, cardiac cell, neural cell, skeletal muscle cell, embryonic, induced pluripotent, or other stem cell, cancer cell, etc.). In some embodiments, the promoters for use in sensory neurons include btu are not limited to TRPV1, CGRP, and NF200.

[0103] In some embodiments of the present disclosure, the promoter of may be a constitutive mammalian promoter. Exemplary constitutive mammalian promoters include but are not limited to SV40, CMV, CAG, EF1a, UbC, RSV, β-actin, and PGK Depending on the activity of the promoter within the transgene, the transgene may be expressed in any type of mammalian cell that can be infected without cytotoxicity associated with viral gene expression.

[0104] In other embodiments, the promoter may be an inducible promoter. Inducible promoters are well-known in the art. Exemplary inducible promoters include but are not limited to a tetracycline-inducible promoter or a doxycycline-inducible promoter. In some embodiments, the inducible promoter is a Tet-On promoter. In some embodiments, a Tet-On promoter may include, but is not limited to, TRE3G or TRE-tight. When a Tet-On promoter is used, expression of its cognate rtTA is needed. For example, use of TRE3G as the promoter necessitates expression of the cognate dox-sensitive transactivator protein, rtTA3G. The cognate rtTA can be expressed from the amplicon, a separate vector, or from target cells or tissue (e.g., by introduction of a viral (e.g., AAV) vector encoding the rtTA into the target cells or tissue).

[0105] In some embodiments, at least one cargo nucleic acid sequence may comprise additional regulatory elements. For example, the cargo nucleic acid sequence may include one or more sites for binding of microRNA. In some embodiments, the cargo nucleic acid sequence may comprise tandem binding sites for the microRNAs, such as 2, 3, 4, 5, or 6 tandem sites. The presence of such sites, particularly tandem binding sites for such microRNAs, facilitates down-regulation of the transgene expression in certain cell types. Thus, for example, a transgene for expression in a cancer or tumor cell (which may be toxic to many cell types) can comprise binding sites for microRNAs of “normal” (e.g., non-malignant) cells, so that the expression of the transgene is suppressed in non-malignant cells.

[0106] The cargo nucleic acid sequence may be monocistronic (e.g., encoding a single protein or polypeptide) or polycistronic (e.g., encoding multiple proteins or polypeptides). All or part of the transcribed portion of the cargo nucleic acid sequence may also encode non-translated RNA, such as siRNA or miRNA. Multiple separate monocistronic or polycistronic transgene units (preferably two separate transgene units but possibly more (e.g., three, four, five, or more separate units)), each with its own respective promoter, translated sequence(s) or non-translated RNA sequence(s), and other regulatory elements may be used. In one embodiment, the cargo nucleic acid sequence may comprise a genomic gene that includes the gene's respective promoter, as well as introns and other regulatory sequences.

[0107] In some other embodiments, the cargo nucleic acid sequence or the payload may include a mammalian origin of replication, which leads to amplicon persistence in dividing cells post-transduction. Any suitable mammalian on may be used, including, but not limited to, those described in Hamlin. Bioessays 14(10): 651-659 (1992).

[0108] In some other embodiments, the cargo nucleic acid sequence or the payload may include Epstein-Barr Virus OriP and EBNA-1 sequences, which leads to amplicon persistence in dividing mammalian cells as described in Shan, Journal of Gene Medicine 8(12): 1400-6 (2006).

[0109] In another aspect, the present disclosure provides a method of producing a Herpes Simplex Virus (HSV) amplicon particle comprising transfecting the packaging cell line of any one of the above embodiments with an amplicon vector of any one of the above embodiments. In some embodiments, the HSV amplicon particle may comprise an HSV-1 or an HSV-2 amplicon particle.

[0110] The amplicon vector can be introduced into the packaging cell line via conventional transformation or transfection techniques. As used herein, the terms “transformation” and “transfection” can refer to a variety of art-recognized techniques for introducing foreign nucleic acid into a host cell, including calcium phosphate or calcium chloride co-precipitation, DEAE-dextran-mediated transfection, lipofection, electroporation, biolistics or viral-based transfection. Other methods used to transform mammalian cells include the use of polybrene, protoplast fusion, and the like. Suitable methods for transforming or transfecting host cells can be found in Sambrook, et al. (MOLECULAR CLONING: A LABORATORY MANUAL. 2nd ed., Cold Spring Harbor Laboratory, Cold Spring Harbor Laboratory Press, Cold Spring Harbor, N.Y., 1989), and other laboratory manuals. The amplicon vector containing the DNA segments of interest can be transferred into the host cell by well-known methods, depending on the type of cellular host. In some embodiments, the amplicon vector can be introduced into the packaging cell line via transformation. In some cases, the transformation can comprise heat-shock transformation. In some cases, the transformation can comprise electroporation. In some cases, the transformation can comprise cell-cell fusion. In some embodiments, the amplicon vector can be introduced into the packaging cell line via transfection. In some cases, the transfection can comprise a physical transfection. In some non-limiting example embodiments, physical transfection includes: electroporation, sonoporation, optical transfection, or hydrodynamic delivery. In some cases, the transfection can use a chemical transfection method. In some non-limiting example embodiments, a chemical transfection method can include: calcium phosphate, cationic polymers, lipofection, fugene, or dendrimers. In some embodiments, the gene can be integrated into the genome via transduction (e.g., foreign nucleic acid introduced into a cell by a virus or viral vector).

[0111] In some embodiments, the number of HSV amplicon particles may be amplified by passaging. The method can further comprise isolating the HSV amplicon particles from the packaging cell line to provide a stock of amplicon particles. For a non-limiting example, the amplicon particles may be manufactured in roller bottles containing cells transduced with the HSV vector. After cell lysis, the HSV amplicon particles can be purified on a continuous Nycodenze gradient, and aliquoted and stored until needed. Viral stocks vary considerably in titer, depending largely on viral genotype and the protocol and cell lines used to prepare them. A stock of the HSV amplicon particles of the present technology may have a viral titer of about 10⁶ pfui/ml, about 10⁷ pfu/ml, about 10⁸ pfu/ml, about 10⁹ pfu/ml about 10¹⁰ pfu/ml, about 10¹¹ pfu/ml, about 10¹² pfu/ml, or more. Genome copy (gc) numbers provide a cell line-independent measure of the number of virus particles, but it includes defective particles. Typically, gc values for wild-type HSV-1 are several to 20×, up to 100×, higher than the pfu values of the same stocks. For mutant viruses, especially defective viruses grown on complementing cells, the value can increase to 10,000× higher or even more. Gc and pfu values increase proportionally with the size of the stock.

[0112] In some aspects, the present disclosure provides an amplicon particle produced by the method described herein. In some embodiments, the amplicon particle may further comprise HSV capsid, tegument, and/or envelope proteins.

### Transgene Expression

[0113] HSV can infect a wide variety of mammalian cells and thus the vectors of the present technology have broad applicability. In one aspect, the present disclosure provides a method of expressing a transgene in a cell, the method comprising contacting the cell with an HSV amplicon particle described in any of the above embodiments, e.g., an HSV amplicon particle produced by the method of any of the above embodiments, such that the transgene is expressed within the cell. In some embodiments, the HSV amplicon particles of the present technology are exposed to the cell under conditions suitable for the HSV amplicon particle to infect the cell. Once the cell is infected, the transgene will be transcribed (expressed) within the cell, provided the promoter within the transgene is one which is active in the cell and that the transgene is not suppressed by another regulatory mechanism.

[0114] In some embodiments, the contacting may occur in vivo. For example, the contacting may occur within an organism. The cell HSV amplicon particle is contacted with can be any type of desired cell, such as exocrine secretory cells (e.g., glandular cells, such as salivary gland cells, mammary gland cells, sweat gland cells, digestive gland cells, etc.), hormone secreting gland cells (e.g., pituitary cells, thyroid cells, parathyroid cells, adrenal cells, etc.), ectoderm-derived cells (e.g., keratinizing epithelial cells (e.g., making up the skin and hair), wet stratified barrier epithelial cells (e.g., of the cornea, tongue, oral cavity, gastrointestinal tract, urethra, vagina, etc.), cells of the nervous system (e.g., peripheral and central neurons, glia, etc.), mesoderm-derived cells, cells of many internal organs (such as kidney, liver, pancreas, heart, lung) bone marrow cells, and cancerous cells either within tumors or otherwise. In some embodiments, the cell is a liver cell, a lung cell, an epithelial cell, a neural cell, a cardiac cell, a muscle cell, a stem cell, or a cancer cell.

[0115] In some aspects, the method described herein can be used to treat a disease or a condition in a subject, wherein a transgene within the HSV or amplicon vector encodes one or more agents comprising prophylactically- or therapeutically-active proteins, polypeptides, or other factors (e.g., non-coding RNA (ncRNA) such as siRNA or miRNA). Thus, the present technology provides a method of treating a disease or a condition in a subject comprising administering the HSV amplicon particle to the subject in an amount that is sufficient to infect cells of the subject and therapeutically effective to treat the disease or the condition, such that the transgene encoding one or more agents comprising prophylactically or therapeutically active proteins, polypeptides, or other factors is expressed within the cells of the subject, thereby treating the disease or the condition. For example, the disease or condition may be a type of cancer, in which the transgene can encode an agent that enhances tumor killing activity (such as TRAIL or tumor necrosis factor (TNF)). As additional non-limiting example, the transgene may encode an agent suitable for the treatment of conditions such as muscular dystrophy (a suitable transgene encodes Dystrophin), cardiovascular disease (suitable transgenes include, e.g., SERCA2a, GATA4, Tbx5, Mef2C, Hand2, Myocd, etc.), neurodegenerative disease (suitable transgenes include, e.g., NGF, BDNF, GDNF, NT-3, Huntingtin, etc.), chronic pain (suitable transgenes encode GlyRa1, an enkephalin, or a glutamate decarboxylase (e.g., GAD65, GAD67, or another isoform), lung disease (e.g., CFTR), or hemophilia (suitable transgenes encode, e.g., Factor VIII or Factor IX).

[0116] In some other embodiments, the contacting may occur in vitro. Any type of cells can be infected in vitro, such as stem cells and fibroblasts (e.g., human dermal fibroblasts (HDF) or human lung fibroblasts (HLF)). Other non-limiting types of cells for use in vitro include keratinocytes, peripheral blood mononuclear cells, hematopoietic stem cells (CD34+), or mesenchymal stem/progenitor cells. In some embodiments, the transgene encodes one or more factors related to the differentiation of the cell. For example, expression of one or more of Oct4, Klf4, Sox2, c-Myc, L-Myc, dominant-negative p53, Nanog, Glis1, Lin28, TFIID, mir-302/367, or other miRNAs can cause the cell to become an induced pluripotent stem (iPS) cell. Alternatively, the transgene(s) can encode a factor for transdifferentiating the cells (e.g., one or more of GATA4, Tbx5. Mef2C, Myocd, Hand2, SRF, Mesp1, SMARCD3 (for cardiomyocytes); Ascl1, Nurr1, Lmx1A, Bm2, Mytl1, NeuroD1, FoxA2 (for neural cells), Hnf4a, Foxa1, Foxa2, or Foxa3 (for hepatic cells).

[0117] In any of the above embodiment, the cell may be a human cell.

### Pharmaceutical Compositions, Systems, Kits, and Therapeutic Applications

[0118] In some aspects, the present disclosure provides a pharmaceutical composition comprising any compositions described herein (e.g., any HSV amplicon particles described herein), and a pharmaceutically acceptable excipient.

[0119] A pharmaceutical composition can denote a mixture or solution comprising a therapeutically effective amount of an active pharmaceutical ingredient together with one or more pharmaceutically acceptable excipients to be administered to a subject in need thereof.

[0120] The term “pharmaceutically acceptable” can denote an attribute of a material which is useful in preparing a pharmaceutical composition that is generally safe, non-toxic, and neither biologically nor otherwise undesirable and is acceptable for veterinary as well as human pharmaceutical use. The term “pharmaceutically acceptable” can refer to a material, such as a carrier or diluent, which does not abrogate the biological activity or properties of the compound, and is relatively nontoxic, i.e., the material may be administered to an individual without causing undesirable biological effects or interacting in a deleterious manner with any of the components of the composition in which it is contained. A “pharmaceutically acceptable excipient” can denote any pharmaceutically acceptable ingredient in a pharmaceutical composition having no therapeutic activity and being non-toxic to the subject administered, such as disintegrators, binders, fillers, solvents, buffers, tonicity agents, stabilizers, antioxidants, surfactants, carriers, diluents, excipients, preservatives or lubricants used in formulating pharmaceutical products. Pharmaceutical compositions can facilitate administration of a compound to an organism and can be formulated in a conventional manner using one or more pharmaceutically acceptable inactive ingredients that can facilitate processing of active compounds or compositions into preparations that can be used pharmaceutically. A proper formulation is dependent upon the route of administration chosen and a summary of pharmaceutical compositions can be found, for example, in Remington: The Science and Practice of Pharmacy, Nineteenth Ed (Easton, Pa.: Mack Publishing Company, 1995); Hoover. John E., Remington's Pharmaceutical Sciences, Mack Publishing Co., Easton, Pennsylvania 1975; Liberman, H. A, and Lachman, L., Eds., Pharmaceutical Dosage Forms, Marcel Decker, New York, N.Y., 1980; and Pharmaceutical Dosage Forms and Drug Delivery Systems, Seventh Ed. (Lippincott Williams & Wilkins 1999), herein incorporated by reference. In some embodiments, pharmaceutical compositions can be formulated by dissolving active substances (e.g., HSV amplicon particles described herein) in aqueous solution for injection into a subject in need thereof. In some embodiments, pharmaceutical compositions can be formulated by dissolving active substances (e.g., HSV amplicon particles described herein) in aqueous solution for direct injection into disease tissues or disease cells.

[0121] Provided herein are HSV amplicon particles, compositions, systems, and/or methods useful in the treatment of a disease or condition. In some aspects, HSV amplicon particles, compositions or systems are present or administered in an amount sufficient to treat or prevent a disease or condition. In some aspects, provided herein, is a method of treating a disease or condition comprising administering to a subject in need thereof HSV amplicon particles or pharmaceutical compositions described herein. In some aspects, provided herein, are HSV amplicon particles, compositions, systems, or pharmaceutical compositions described herein for use in a method of treating a disease or a condition in a subject in need thereof. In certain aspects, HSV amplicon particles, compositions, systems, kits, or pharmaceutical compositions described herein can be used in a gene therapy. In some aspects, provided herein, is the use of HSV amplicon particles, compositions, systems, or pharmaceutical compositions described herein for the manufacture of a medicament for treating a disease or a condition in a subject in need thereof.

[0122] Also provided herein are methods of treating a disease or condition in a subject in need thereof, comprising administering to the subject a therapeutically effective amount of any compositions or pharmaceutical compositions described herein. The terms “effective amount” or “therapeutically effective amount,” as used herein, can refer to a sufficient amount of an agent or a compound being administered which will relieve to some extent one or more of the symptoms of the disease or the condition being treated; for example a reduction and/or alleviation of one or more signs, symptoms, or causes of a disease, or any other desired alteration of a biological system. For example, an “effective amount” for therapeutic uses can be an amount of an agent that provides a clinically significant decrease in one or more disease symptoms. An appropriate “effective” amount may be determined using techniques, such as a dose escalation study, in individual cases.

[0123] The terms “treat,” “treating” or “treatment,” as used herein, can include alleviating, abating or ameliorating at least one symptom of a disease or a condition, preventing additional symptoms, inhibiting the disease or the condition. e.g., arresting the development of the disease or the condition, relieving the disease or the condition, causing regression of the disease or the condition, relieving a condition caused by the disease or the condition, or stopping the symptoms of the disease or the condition either prophylactically and/or therapeutically. In some embodiments, treating a disease or condition can comprise reducing the size of disease tissues or disease cells. In some embodiments, treating a disease or a condition in a subject can comprise increasing the survival of a subject. In some embodiments, treating a disease or condition can comprise reducing or ameliorating the severity of a disease, delaying onset of a disease, inhibiting the progression of a disease, reducing hospitalization of or hospitalization length for a subject, improving the quality of life of a subject, reducing the number of symptoms associated with a disease, reducing or ameliorating the severity of a symptom associated with a disease, reducing the duration of a symptom associated with a disease, preventing the recurrence of a symptom associated with a disease, inhibiting the development or onset of a symptom of a disease, or inhibiting of the progression of a symptom associated with a disease. In some embodiments, treating a cancer can comprise reducing the size of tumor or increasing survival of a patient with a cancer. In some embodiments, treating a cancer can comprise enhancing tumor killing activity. In some embodiments. HSV amplicon particles, compositions, pharmaceutical compositions, or systems described herein, may comprise a transgene encoding an agent that enhances tumor killing activity.

[0124] In some cases, a subject can encompass mammals. Examples of mammals can include, but are not limited to, any member of the mammalian class: humans, non-human primates such as chimpanzees, and other apes and monkey species; farm animals such as cattle, horses, sheep, goats, swine; domestic animals such as rabbits, dogs, and cats; laboratory animals including rodents, such as rats, mice and guinea pigs, and the like. In some cases, the mammal may be a human. In some cases, the subject may be an animal. In some cases, an animal may comprise human beings and non-human animals. In one embodiment, a non-human animal may be a mammal, for example a rodent such as rat or a mouse. In another embodiment, a non-human animal may be a mouse. In some instances, the subject may be a mammal. In some instances, the subject may be a human. In some instances, the subject may be an adult, a child, or an infant. In some instances, the subject is may be a companion animal. In some instances, the subject may be a feline, a canine, or a rodent. In some instances, the subject may be a dog or a cat.

[0125] HSV amplicon particles or pharmaceutical compositions described herein may be administered as a combination therapy. Combination therapies with two or more therapeutic agents or therapies may use agents and therapies that work by different mechanisms of action. Combination therapies using agents or therapies with different mechanisms of action can result in additive or synergetic effects. Combination therapies may allow for a lower dose of each agent than is used in monotherapy, thereby reducing toxic side effects and/or increasing the therapeutic index of the agent(s). Combination therapies can decrease the likelihood that resistant disease cells will develop. In some instances, combination therapies comprise a therapeutic agent or therapy that affects the immune response (e.g., enhances or activates the response) and a therapeutic agent that affects (e.g., inhibits or kills) the disease cells. In some instances, combination therapies may comprise (i) recombinant RNA compositions or pharmaceutical compositions described herein; and (ii) one or more additional therapies known in the art for the diseases described herein. In some embodiments, HSV amplicon particles or pharmaceutical compositions described herein may be administered to a subject with a disease or condition prior to, concurrently with, and/or subsequently to, administration of one or more additional therapies for combination therapies. In some embodiments, the one or more additional therapies may comprise 1, 2, 3, or more additional therapeutic agents or therapies.

[0126] In some embodiments, a disease or condition may comprise a cancer or a non-cancer disease or a condition. For example, a disease or condition may comprise, but is not limited to, a cancer, muscular dystrophy, non-syndromic deafness, Stargardt Disease, Leber congenital amaurosis 10, Alstrom syndrome, a glycogen storage disease, Usher Syndrome 1D, Usher Syndrome 1B, a cardiovascular disease, a neurodegenerative disease, chronic pain, a lung disease, or hemophilia.

[0127] In one embodiment, a disease or condition may comprise a disease or condition caused by a genetic mutation. In some embodiments, a genetic mutation may comprise an insertion, a deletion, and/or a substitution of at least one nucleotide. In some embodiments, a genetic mutation may comprise an insertion, a deletion, and/or a substitution of at least one nucleotide in a gene encoding a protein. In some embodiments, an insertion, a deletion, and/or a substitution of at least one nucleotide in a gene encoding a protein may result in an insertion, a deletion, and/or a substitution of at least one amino acid in the protein encoded by the gene. In some embodiments, a genetic mutation may comprise an insertion, a deletion, and/or a substitution of at least one nucleotide in other elements important for gene expression. In some embodiments, a genetic mutation may be in a non-coding element important for gene expression. In some embodiments, a genetic mutation may be in a promoter sequence, an enhancer sequence, an insulator sequence, a terminator sequence, an operon sequence, a silencer sequence, a cis-acting element sequence, a trans-acting element sequence, or a sequence affecting structural configuration. In some embodiments, a disease or condition may be caused by a mutation in a gene, including missense, splicing, frameshift and nonsense mutations, as well as whole gene deletions, which result in deficient protein production. As a non-limiting example, Duchenne muscular dystrophy (DMD) is an X-linked recessive disorder that affects 1 in 3,500 males and is caused by mutations in the dystrophin gene.

[0128] In another embodiment, the described HSV amplicon particles, pharmaceutical compositions, or methods may be used to treat subjects having a disease or condition not caused by genetic mutation. In some embodiments, HSV amplicon particles, pharmaceutical compositions, or methods described herein may be used to treat subjects having a disease or condition, who can benefit from increased production of a protein encoded by a transgene comprised in HSV amplicon particles or pharmaceutical compositions described herein.

[0129] In some embodiments, the disease or condition may comprise a cancer. Examples of a cancer can include, but are not limited to, breast cancer, lung cancer, liver cancer, glioblastoma, melanoma, head and neck squamous cell carcinoma, renal cell carcinoma, neuroblastoma, Wilms tumor, retinoblastoma, rhabdomyosarcoma, osteosarcoma, Ewing sarcoma, bladder cancer, cervical cancer, colon cancer, rectal cancer, endometrial cancer, kidney cancer, mesothelioma, non-small cell lung cancer, nonmelanoma skin cancer, ovarian cancer, pancreatic cancer, prostate cancer, small cell lung cancer, colorectal cancer, thyroid cancer, sarcomas, carcinomas, lymphomas, laryngeal cancer, hypopharyngeal cancer, tonsil cancer, nasal cavity cancer, paranasal sinus cancer, nasopharyngeal cancer, metastatic squamous neck cancer with occult primary, lip cancer, oral cancer, oropharyngeal cancer, salivary gland cancer, brain tumors, esophageal cancer, eye cancer, parathyroid cancer, or leukemia, acute myeloid leukemia, colon cancer, gastric cancer, macular degeneration, acute monocytic leukemia, breast cancer, hepatocellular carcinoma, cone-rod dystrophy, alveolar soft part sarcoma, myeloma, skin melanoma, prostatitis, pancreatitis, pancreatic cancer, retinitis, adenocarcinoma, adenoiditis, adenoid cystic carcinoma, cataract, retinal degeneration, gastrointestinal stromal tumor, Wegener's granulomatosis, sarcoma, myopathy, prostate adenocarcinoma, Hodgkin's lymphoma, ovarian cancer, non-Hodgkin's lymphoma, multiple myeloma, chronic myeloid leukemia, acute lymphoblastic leukemia, renal cell carcinoma, transitional cell carcinoma, colorectal cancer, chronic lymphocytic leukemia, anaplastic large cell lymphoma, kidney cancer, breast cancer, cervical cancer, adenocarcinoma, melanoma (e.g., metastatic melanoma), liver cancer (e.g., hepatocellular carcinoma, hepatoblastoma, liver carcinoma), prostate cancer (e.g., prostate adenocarcinoma, androgen-independent prostate cancer, androgen-dependent prostate cancer, prostate carcinoma), sarcoma (e.g., leiomyosarcoma, rhabdomyosarcoma), brain cancer (e.g., glioma, a malignant glioma, astrocytoma, brain stem glioma, ependymoma, oligodendroglioma, nonglial tumor, acoustic neurinoma, craniopharyngioma, medulloblastoma, meningioma, pineocytoma, pineoblastoma, primary brain lymphoma, anaplastic astrocytoma, juvenile pilocytic astrocytoma, a mixture of oligodendroglioma and astrocytoma elements), breast cancer (e.g., triple negative breast cancer, metastatic breast cancer, breast carcinoma, breast sarcoma, adenocarcinoma, lobular (small cell) carcinoma, intraductal carcinoma, medullary breast cancer, mucinous breast cancer, tubular breast cancer, papillary breast cancer, inflammatory breast cancer). Paget's disease, juvenile Paget's disease, lung cancer (e.g., KRAS-mutated non-small cell lung cancer, non-small cell lung cancer, squamous cell carcinoma (epidermoid carcinoma), adenocarcinoma, large-cell carcinoma, small cell lung cancer, lung carcinoma), pancreatic cancer (e.g., insulinoma, gastrinoma, glucagonoma, vipoma, somatostatin-secreting tumor, carcinoid tumor, islet cell tumor, pancreas carcinoma), skin cancer (e.g., skin melanoma, basal cell carcinoma, squamous cell carcinoma, melanoma, superficial spreading melanoma, nodular melanoma, lentigo malignant melanoma, acrallentiginous melanoma, skin carcinoma), cervical cancer (e.g., squamous cell carcinoma, adenocarcinoma, cervical carcinoma), ovarian cancer (e.g., ovarian epithelial carcinoma, borderline tumor, germ cell tumor, stromal tumor, ovarian carcinoma), cancer of the mouth, cancer of the nervous system (e.g., cancer of the central nervous system, a CNS germ cell tumor), goblet cell metaplasia, kidney cancer (e.g., renal cell cancer, adenocarcinoma, hypemephroma, Wilms' tumor, fibrosarcoma, transitional cell cancer (renal pelvis and/or uterer), renal cell carcinoma, renal carcinoma), bladder cancer (e.g., transitional cell carcinoma, squamous cell cancer, carcinosarcoma), stomach cancer (e.g., fungating (polypoid), ulcerating, superficial spreading, diffusely spreading, liposarcoma, fibrosarcoma, carcinosarcoma), uterine cancer (e.g., endometrial cancer, endometrial carcinoma, uterine sarcoma), cancer of the esophagus (e.g., squamous cancer, adenocarcinoma, adenoid cyctic carcinoma, mucoepidermoid carcinoma, adenosquamous carcinoma, sarcoma, melanoma, plasmacytoma, verrucous carcinoma, and oat cell (small cell) carcinoma, esophageal carcinomas), colon cancer (e.g., colon carcinoma), cancer of the rectum (e.g., rectal cancers), colorectal cancer (e.g., colorectal carcinoma, metastatic colorectal cancer, hereditary nonpolyposis colorectal cancer, KRAS mutated colorectal cancer), gallbladder cancer (e.g., adenocarcinoma, cholangiocarcinoma, papillary cholangiocarcinoma, nodular cholangiocarcinoma, diffuse cholangiocarcinoma), testicular cancer (e.g., germinal tumor, seminoma, anaplastic testicular cancer, classic (typical) testicular cancer, spermatocytic testicular cancer, nonseminoma testicular cancer), embryonal carcinoma (e.g., teratoma carcinoma, choriocarcinoma (yolk-sac tumor)), gastric cancer (e.g., gastrointestinal stromal tumor, cancer of other gastrointestinal tract organs, gastric carcinomas), bone cancer (e.g., connective tissue sarcoma, bone sarcoma, cholesteatoma-induced bone osteosarcoma, Paget's disease of bone, osteosarcoma, chondrosarcoma, Ewing's sarcoma, malignant giant cell tumor, fibrosarcoma of bone, chordoma, periosteal sarcoma, soft-tissue sarcoma, angiosarcoma (hemangiosarcoma), fibrosarcoma, Kaposi's sarcoma, leiomyosarcoma, alveolar soft part sarcoma), liposarcoma, lymphangiosarcoma, neurilemmoma, rhabdomyosarcoma, synovial sarcoma, cancer of the lymph node (e.g., lymphangioendotheliosarcoma), adenoid cystic carcinoma, vaginal cancer (e.g., squamous cell carcinoma, adenocarcinoma, melanoma), vulvar cancer (e.g., squamous cell carcinoma, melanoma, adenocarcinoma, sarcoma, Paget's disease), cancer of other reproductive organs, thyroid cancer (e.g., papillary thyroid cancer, follicular thyroid cancer, medullary thyroid cancer, anaplastic thyroid cancer, thyroid carcinoma), salivary gland cancer (e.g., adenocarcinoma, mucoepidermoid carcinoma), eye cancer (e.g., ocular melanoma, iris melanoma, choroidal melanoma, ciliary body melanoma, retinoblastoma), penal cancers, oral cancer (e.g. squamous cell carcinoma, basal cancer), pharynx cancer (e.g., squamous cell cancer, verrucous pharynx cancer), cancer of the head, cancer of the neck, cancer of the throat, cancer of the chest, cancer of the spleen, cancer of skeletal muscle, cancer of subcutaneous tissue, adrenal cancer, pheochromocytoma, adrenocortical carcinoma, pituitary cancer, Cushing's disease, prolactin-secreting tumor, acromegaly, diabetes insipidus, myxosarcoma, osteogenic sarcoma, endotheliosarcoma, mesothelioma, synovioma, hemangioblastoma, epithelial carcinoma, cystadenocarcinoma, bronchogenic carcinoma, sweat gland carcinoma, sebaceous gland carcinoma, papillary carcinoma, papillary adenocarcinomas, ependymoma, optic nerve glioma, primitive neuroectodermal tumor, rhabdoid tumor, renal cancer, glioblastoma multiforme, neurofibroma, neurofibromatosis, pediatric cancer, neuroblastoma, malignant melanoma, carcinoma of the epidermis, polycythemia vera, Waldenstrom's macroglobulinemia, monoclonal gammopathy of undetermined significance, benign monoclonal gammopathy, heavy chain disease, pediatric solid tumor, Ewing's sarcoma, Wilms tumor, carcinoma of the epidermis, HIV-related Kaposi's sarcoma, rhabdomyosarcoma, thecomas, arrhenoblastomas, endometrial carcinoma, endometrial hyperplasia, endometriosis, fibrosarcomas, choriocarcinoma, nasopharyngeal carcinoma, laryngeal carcinoma, hepatoblastoma, Kaposi's sarcoma, hemangioma, cavernous hemangioma, hemangioblastoma, retinoblastoma, glioblastoma, Schwannoma, neuroblastoma, rhabdomyosarcoma, leiomyosarcoma, urinary tract carcinoma, abnormal vascular proliferation associated with phakomatoses, edema (such as that associated with brain tumors), Meigs' syndrome, pituitary adenoma, primitive neuroectodermal tumor, medulloblastoma, and acoustic neuroma. In some embodiments, a cancer may be a solid tumor or a solid cancer. In some embodiments, a solid tumor can be benign or malignant. In some embodiments, a cancer may be a liquid cancer.

[0130] HSV amplicon particles or pharmaceutical compositions described herein can be administered to a subject using any suitable methods known in the art. Suitable formulations for use and methods of delivery are generally well known in the art. For example, HSV amplicon particles or pharmaceutical compositions described herein can be administered to the subject in a variety of ways, including parenterally, intravenously, intradermally, intramuscularly, colonically, rectally, or intraperitoneally. In some embodiments, HSV amplicon particles or pharmaceutical compositions described herein can be administered by intraperitoneal injection, intramuscular injection, subcutaneous injection, or intravenous injection of the subject. In some embodiments, HSV amplicon particles or pharmaceutical compositions described herein can be administered parenterally, intravenously, intramuscularly or orally. In some embodiments, HSV amplicon particles or pharmaceutical compositions described herein can be administered via injection into a subject in need thereof. In some embodiments, HSV amplicon particles or pharmaceutical compositions described herein can be administered via injection into disease tissues or cells.

[0131] Any of HSV amplicon particles, compositions, systems, and pharmaceutical compositions described herein may be provided in a kit. The kit can contain, for example, materials and/or instruments for production of HSV amplicon particles and/or the storage and/or preservation of HSV amplicon particles, compositions, systems, and pharmaceutical compositions described herein (e.g., containers; materials for temperature control such as ice, ice packs, cold packs, dry ice, liquid nitrogen; chemical preservatives or buffers such as formaldehyde, formalin, paraformaldehyde, glutaraldehyde, alcohols such as ethanol or methanol, acetone, acetic acid, HOPE fixative (Hepes-glutamic acid buffer-mediated organic solvent protection effect), heparin, saline, phosphate buffered saline, TAPS, bicine, Tris, tricine, TAPSO, HEPES, TES, MOPS, PIPES, eadodylate, SSC, MES, phosphate buffer; protease inhibitors such as aprotinin, bestatin, calpain inhibitor I and II, chymostatin, E-64, leupeptin, alpha-2-macroglobulin, pefabloc SC, pepstatin, phenylmethanesufonyl fluoride, trypsin inhibitors; DNAse inhibitors such as 2-mercaptoethanol, 2-nitro-5-thicyanobenzoic acid, calcium, EGTA, EDTA, sodium dodecyl sulfate, iodoacetate, etc.; RNAse inhibitors such as ribonuclease inhibitor protein; double-distilled water; DEPC (diethyprocarbonate) treated water, etc.). The kit can be provided as, or contain, a suitable container for shipping. The shipping container can be an insulated container. The shipping container can be self-addressed to a collection agent (e.g., laboratory, medical center, genetic testing company, etc.). The kit can be provided to a subject for home use or use by a medical professional. Alternatively, the kit can be provided directly to a medical professional. The kit can contain instructions for use. The instruction manual may comprise instructions for the proper use of the kit.

[0132] In some instances, kits provided herein may be for preparing or producing HSV amplicon particles. In this embodiment, kits can comprise any packaging cell line described herein. In some embodiments, kits can comprise an amplicon vector. In some embodiments, an amplicon vector may comprise an origin of replication (ori) and/or a packaging signal (pac). In some embodiments, an amplicon vector may also comprise a cargo nucleic acid sequence described herein. In some embodiments, a cargo sequence may comprise a transgene. In some embodiments, a cargo nucleic acid sequence may comprise a regulatory element comprising an enhancer, a promoter, a terminator, or a thereof.

[0133] In some instances, kits provided herein may comprise HSV amplicon particles. In some embodiments, kits provided herein may comprise HSV amplicon particles for treatment of a disease or condition described herein. In some embodiments, HSV amplicon particles may comprise a cargo sequence may also comprise a cargo nucleic acid sequence described herein. In some embodiments, a cargo sequence may comprise a transgene. In some embodiments, a cargo nucleic acid sequence may comprise a regulatory element comprising an enhancer, a promoter, a terminator, or a combination thereof.

[0134] Any of HSV amplicon particles, compositions, systems, kits, and pharmaceutical compositions described herein may be provided together with an instruction manual. The instruction manual may comprise guidance for the skilled person how to use packaging cell lines described herein or how to produce HSV amplicon particles described herein in accordance with the disclosure. The instruction manual may comprise guidance for the skilled person or attending physician how to treat (or prevent) a disease or a disorder as described herein in accordance with the disclosure. In some embodiments, the instruction manual may comprise guidance as to the herein described mode of delivery/administration and delivery/administration regimen, respectively (e.g., route of delivery/administration, dosage regimen, time of delivery/administration, frequency of delivery/administration, etc.). In some embodiments, the instruction manual may comprise the instruction on how HSV amplicon particles or pharmaceutical compositions described herein can be administrated or injected and/or can be prepared for administration or injection. In principle, what has been described herein elsewhere with respect to the mode of delivery/administration and delivery/administration regimen, respectively, may be comprised as respective instructions in the instruction manual.

### OTHER EMBODIMENTS

[0135] In some aspects, provided herein is a packaging cell line comprising a recombinant genome, wherein the recombinant genome comprises a. a first nucleic acid sequence comprising one or more Herpes Simplex Virus (HSV) Class I genes; and b. a second nucleic acid sequence comprising one or more HSV Class I and Class II genes.

[0136] In some embodiments, the first nucleic acid sequence further comprises a first one or more regulatory elements. In some embodiments, the first nucleic acid sequence is in a first genomic safe harbor site of the recombinant genome. In some embodiments, the first genomic safe harbor site comprises a Rosa26 homolog locus. In some embodiments, the one or more HSV Class I genes comprise Infected-Cell Polypeptide 4 (ICP4), ICP27, ICP0, ICP34.5, VP16, or a combination thereof.

[0137] In some embodiments, the first one or more regulatory elements comprise an enhancer, a promoter, a terminator, or a combination thereof. In some embodiments, the first one or more regulatory elements comprise the promoter. In some embodiments, the promoter comprises an inducible promoter. In some embodiments, the inducible promoter comprises a tetracycline-inducible promoter or a doxycycline-inducible promoter. In some embodiments, the inducible promoter comprises Tet-On promoter comprising TRE3G or TRE-tight.

[0138] In some embodiments, the second nucleic acid sequence is in a second genomic safe harbor site of the recombinant genome. In some embodiments, the second genomic safe harbor comprises an adeno-associated virus site 1 (AAVS1) locus.

[0139] In some embodiments, the one or more HSV Class II genes comprise UL 1, UL2, UL3, UL4, UL5, UL6, UL7, UL8, UL9, UL10, UL11, UL12, UL13, UL14, UL15, UL16, UL17, UL18, UL19, UL20, UL21, UL22, UL23, UL24, UL25, UL26, UL26.5, UL27, UL28, UL29, UL30, UL31, UL32, UL33, UL34, UL35, UL36, UL37, UL38, UL39, UL40, UL41, UL42, UL43, UL44, UL45, UL46, UL47, UL49, UL49A, UL50, UL51, UL52, UL53, UL55, UL56, US1, US2, US3, US4, US5, US6, US7, US8, US9, US10, US11, US12, or a combination thereof.

[0140] In some embodiments, the second nucleic acid sequence further comprises a second one or more regulatory elements. In some embodiments, the second one or more regulatory elements comprise an enhancer, a promoter, a terminator, or a combination thereof. In some embodiments, the second one or more regulatory elements comprise the promoter. In some embodiments, the promoter comprises a natural promoter for HSV Class II genes comprising UL1, UL2, UL3, UL4, UL5, UL6, UL7, UL8, UL9, UL10, UL11, UL12, UL13, UL14, UL15, UL16, UL17, UL18, UL19, UL20, UL21, UL22, UL23, UL24, UL25, UL26, UL26.5, UL27, UL28, UL29, UL30, UL31, UL32, UL33, UL34, UL35, UL36, UL37, UL38, UL39, UL40, UL41, UL42, UL43, UL44, UL45, UL46, UL47, UL49, UL49A, UL50, UL51, UL52, UL53, UL55, UL56, US1, US2, US3, US4, US5, US6, US7, US8, US9, US10, US11, US12, or a combination thereof.

[0141] In some embodiments, the recombinant genome does not comprise a nucleic acid sequence comprising an HSV origin of replication (ori), an HSV packaging signal (pac), or a combination thereof. In some embodiments, the recombinant genome does not comprise a nucleic acid sequence comprising oriL/S. In some embodiments, the first nucleic acid sequence comprises a sequence with at least 50% sequence identity to SEQ ID NO: 2, SEQ ID NO: 3, SEQ ID NO: 7, or SEQ ID NO: 8. In some embodiments, the first nucleic acid sequence comprises a sequence comprising SEQ ID NO: 2, SEQ ID NO: 3, SEQ ID NO: 7, or SEQ ID NO: 8. In some embodiments, the second nucleic acid sequence comprises a sequence with at least 50% sequence identity to SEQ ID NO: 5, SEQ ID NO: 6, SEQ ID NO: 9, SEQ ID NO: 10, or SEQ ID NO: 17. In some embodiments, the second nucleic acid sequence comprises a sequence comprising SEQ ID NO: 5, SEQ ID NO: 6, SEQ ID NO: 9, SEQ ID NO: 10, or SEQ ID NO: 17.

[0142] In some embodiments, the packaging cell line comprises a mammalian cell line. In some embodiments, the packaging cell line is a Human Bone Osteosarcoma Epithelial (U2OS) cell line, a Baby Hamster Kidney (BHK) cell line, a Human Embryonic Kidney (HEK 293) cell line, or an African Green Monkey Kidney (Vero) cell line. In some embodiments, the U2OS cell line comprises U2OS cells comprising ICP4 and ICP27 genes (U2OS-4/27). In some embodiments, the U2OS cell line comprises U2OS cells comprising ICP0, ICP4, and ICP27 genes (U2OS-0-4/27).

[0143] In some aspects, provided herein is a composition comprising a recombinant genome, wherein the recombinant genome comprises a. a first nucleic acid sequence comprising one or more Herpes Simplex Virus (HSV) Class I genes; and b. a second nucleic acid sequence comprising one or more HSV Class I and Class II genes.

[0144] In some aspects, provided herein is a method of producing a packaging cell line comprising introducing into a cell comprising a genome: a. a first nucleic acid sequence comprising one or more Herpes Simplex Virus (HSV) Class I genes; and b. a second nucleic acid sequence comprising one or more HSV Class I and Class II genes.

[0145] In some aspects, provided herein is a system for producing a Herpes Simplex Virus (HSV) amplicon particle comprising: a. any packaging cell line described herein; and b. an amplicon vector. In some embodiments, the amplicon vector comprises at least one cargo nucleic acid sequence. In some embodiments, the at least one cargo nucleic acid sequence comprises from about 10 to about 150 kb. In some embodiments, the at least one cargo nucleic acid sequence comprises up to 100 kb.

[0146] In some embodiments, the at least one cargo nucleic acid sequence is inserted site-specifically in the amplicon vector by restriction enzyme digestion cloning, Golden Gate Assembly, in vitro Cas9 digestion followed by Gibson assembly, Gateway cloning, or in yeasto recombination assembly. In some embodiments, the at least one cargo nucleic acid sequence is inserted by restriction enzyme digestion cloning using one or more restriction enzyme sites comprising PacI, BbsI, BbsI-HF, BcoDI, BsaI-HF, BsmBI-v2, BsmI, BspQI, BsrDI, BsrI, BtsI-v2, BtsIMutI, EarI, Esp3I, SapI, AcuI, BaeI, BcgI, BpmI, BpuEI, BsaXI, BseRI, BsgI, BsmFI, BspCNI, BtgZI, CspCI, EcI, I, MmeI, NmeAIII, AwI, BbvI, BccI, BceAI, BcI, VI, BfuAI, BmrI, BsmAI, BspMI, BtsCI, FauI, FokI, HgaI, HphI, HpyAV, MboII, MlyI, MnlI, PaqCI, PleI, SfaNI, I-CeuI, I-SceI, PI-PspI, PI-SceI, PmeI, or a combination thereof. In some embodiments, the at least one cargo nucleic acid sequence is inserted by Gateway cloning using one or more Gateway cloning sites comprising attR1, attR2, or a combination thereof. In some embodiments, the at least one cargo nucleic acid sequence is inserted by in yeasto recombination assembly using one or more in yeasto recombination sites comprising NeoLVec, NeoRVec, or a combination thereof. In some embodiments, the at least one cargo nucleic acid sequence is inserted by in vitro Cas9 digestion followed by Gibson assembly using a Cas9 gRNA sequence.

[0147] In some embodiments, the at least one cargo nucleic acid sequence comprises a transgene. In some embodiments, the transgene comprises CRISPR associated protein 9 (Cas9), Cas3, Cas12a, Dystrophin (DYS), amylo-alpha-1, 6-glucosidase, 4-alpha-glucanotransferase (AGL), otoferlin (OTOF), myosin VIIA (MYO7A), ATP binding cassette subfamily A member 4 (ABCA4), coagulation factor VIII (F8), centrosomal protein 290 (CEP290), cadherin related 23 (CDH23), or centrosome and basal body associated protein (ALMS1). In some embodiments, the transgene comprises a gene encoding an agent for treating a cancer, muscular dystrophy, non-syndromic deafness, Stargardt Disease, Leber congenital amaurosis 10, Alstrom syndrome, a glycogen storage disease, Usher Syndrome 1D, Usher Syndrome 1B, a cardiovascular disease, a neurodegenerative disease, chronic pain, a lung disease, or hemophilia.

[0148] In some embodiments, the at least one cargo nucleic acid sequence further comprises at least one regulatory element comprising an enhancer, a promoter, a terminator, or a combination thereof. In some embodiments, the amplicon vector comprises an origin of replication (ori) and a packaging signal (pac). In some embodiments, the HSV amplicon particle comprises an HSV-1 or an HSV-2 amplicon particle.

[0149] In some embodiments, the amplicon vector comprises a sequence with at least 50% sequence identity to SEQ ID NO: 1, SEQ ID NO: 11, SEQ ID NO: 12, SEQ ID NO: 13, or SEQ ID NO: 14. In some embodiments, the amplicon vector comprises a sequence comprising SEQ ID NO: 1, SEQ ID NO: 11, SEQ ID NO: 12, SEQ ID NO: 13, or SEQ ID NO: 14. In some embodiments, the amplicon vector comprises a sequence with at least 50% sequence identity to SEQ ID NO: 1. In some embodiments, the amplicon vector comprises a sequence comprising SEQ ID NO: 1. In some embodiments, the amplicon vector comprises a sequence with at least 50% sequence identity to SEQ ID NO: 11. In some embodiments, the amplicon vector comprises a sequence comprising SEQ ID NO: 11. In some embodiments, the amplicon vector comprises a sequence with at least 50% sequence identity to SEQ ID NO: 12. In some embodiments, the amplicon vector comprises a sequence comprising SEQ ID NO: 12. In some embodiments, the amplicon vector comprises a sequence with at least 50% sequence identity to SEQ ID NO: 13. In some embodiments, the amplicon vector comprises a sequence comprising SEQ ID NO: 13. In some embodiments, the amplicon vector comprises a sequence with at least 50% sequence identity to SEQ ID NO: 14. In some embodiments, the amplicon vector comprises a sequence comprising SEQ ID NO: 14.

[0150] In some aspects, provided herein is a method of producing a Herpes Simplex Virus (HSV) amplicon particle comprising transfecting any packaging cell line described herein with an amplicon vector. In some embodiments, the method further comprises isolating the HSV amplicon particle from the packaging cell line.

[0151] In some embodiments, the HSV amplicon particle comprises an HSV-1 or an HSV-2 amplicon particle. In some embodiments, the amplicon vector comprises an origin of replication (ori) and a packaging signal (pac).

[0152] In some embodiments, the amplicon vector further comprises at least one cargo nucleic acid sequence. In some embodiments, the at least one cargo nucleic acid sequence comprises a transgene. In some embodiments, the transgene comprises CRISPR associated protein 9 (Cas9), Cas3, Cas12a, Dystrophin (DYS), amylo-alpha-1, 6-glucosidase, 4-alpha-glucanotransferase (AGL), otoferlin (OTOF), myosin VIIA (MYO7A), ATP binding cassette subfamily A member 4 (ABCA4), coagulation factor VIII (F8), centrosomal protein 290 (CEP290), cadherin related 23 (CDH23), or centrosome and basal body associated protein (ALMS1). In some embodiments, the transgene comprises a gene encoding an agent for treating a cancer, muscular dystrophy, non-syndromic deafness, Stargardt Disease, Leber congenital amaurosis 10, Alstrom syndrome, a glycogen storage disease, Usher Syndrome 1D, Usher Syndrome 1B, a cardiovascular disease, a neurodegenerative disease, chronic pain, a lung disease, or hemophilia.

[0153] In some embodiments, the at least one cargo nucleic acid sequence further comprises at least one regulatory element comprising an enhancer, a promoter, a terminator, or a combination thereof. In some embodiments, the amplicon vector comprises a sequence with at least 50% sequence identity to SEQ ID NO: 1, SEQ ID NO: 11, SEQ ID NO: 12, SEQ ID NO: 13, or SEQ ID NO: 14. In some embodiments, the amplicon vector comprises a sequence comprising SEQ ID NO: 1, SEQ ID NO: 11, SEQ ID NO: 12, SEQ ID NO: 13, or SEQ ID NO: 14. In some embodiments, the amplicon vector comprises a sequence with at least 50% sequence identity to SEQ ID NO: 1. In some embodiments, the amplicon vector comprises a sequence comprising SEQ ID NO: 1. In some embodiments, the amplicon vector comprises a sequence with at least 50% sequence identity to SEQ ID NO: 11. In some embodiments, the amplicon vector comprises a sequence comprising SEQ ID NO: 11. In some embodiments, the amplicon vector comprises a sequence with at least 50% sequence identity to SEQ ID NO: 12. In some embodiments, the amplicon vector comprises a sequence comprising SEQ ID NO: 12. In some embodiments, the amplicon vector comprises a sequence with at least 50% sequence identity to SEQ ID NO: 13. In some embodiments, the amplicon vector comprises a sequence comprising SEQ ID NO: 13. In some embodiments, the amplicon vector comprises a sequence with at least 50% sequence identity to SEQ ID NO: 14. In some embodiments, the amplicon vector comprises a sequence comprising SEQ ID NO: 14.

[0154] In some aspects, provided herein, is a Herpes Simplex Virus (HSV) amplicon particle produced by any method described herein. In some embodiments, the HSV further comprises HSV capsid, tegument, and envelope proteins.

[0155] In some aspects, provided herein is a pharmaceutical composition comprising any HSV amplicon particle described herein, and a pharmaceutically acceptable carrier.

[0156] In some aspects, provided herein is a cell comprising any HSV amplicon particle described herein.

[0157] In some aspects, provided herein is a kit comprising any HSV amplicon particle described herein or any packaging cell line described herein and an instruction manual for using the kit.

[0158] In some aspects, provided herein is a kit for preparing an HSV amplicon particle comprising (i) any packaging cell line described herein and (ii) an amplicon vector comprising an origin of replication (ori) and a packaging signal (pac); and an instruction manual for using the kit. In some embodiments, the amplicon vector further comprises at least one cargo sequence. In some embodiments, the at least one cargo sequence comprises a transgene selected from the group consisting of CRISPR associated protein 9 (Cas9), Cas3, Cas12a, Dystrophin (DYS), amylo-alpha-1, 6-glucosidase, 4-alpha-glucanotransferase (AGL), otoferlin (OTOF), myosin VIIA (MYO7A), ATP binding cassette subfamily A member 4 (ABCA4), coagulation factor VIII (F8), centrosomal protein 290 (CEP290), cadherin related 23 (CDH23), or centrosome and basal body as-sociated protein (ALMS1). In some embodiments, the at least one cargo sequence comprises a transgene encoding an agent for treating a cancer, muscular dystrophy, non-syndromic deafness. Stargardt Disease, Leber congenital amaurosis 10. Alstrom syndrome, a glycogen storage disease, Usher Syndrome 1D, Usher Syndrome 1B, a cardiovascular disease, a neurodegenerative disease, chronic pain, a lung disease, or hemophilia.

[0159] In some embodiments, the at least one cargo nucleic acid sequence further comprises at least one regulatory element comprising an enhancer, a promoter, a terminator, or a combination thereof. In some embodiments, the amplicon vector comprises a sequence with at least 50% sequence identity to SEQ ID NO: 1, SEQ ID NO: 11, SEQ ID NO: 12, SEQ ID NO: 13, or SEQ ID NO: 14. In some embodiments, the amplicon vector comprises a sequence comprising SEQ ID NO: 1, SEQ ID NO: 11, SEQ ID NO: 12, SEQ ID NO: 13, or SEQ ID NO: 14. In some embodiments, the amplicon vector comprises a sequence with at least 50% sequence identity to SEQ ID NO: 1. In some embodiments, the amplicon vector comprises a sequence comprising SEQ ID NO: 1. In some embodiments, the amplicon vector comprises a sequence with at least 50% sequence identity to SEQ ID NO: 11. In some embodiments, the amplicon vector comprises a sequence comprising SEQ ID NO: 11. In some embodiments, the amplicon vector comprises a sequence with at least 50% sequence identity to SEQ ID NO: 12. In some embodiments, the amplicon vector comprises a sequence comprising SEQ ID NO: 12. In some embodiments, the amplicon vector comprises a sequence with at least 50% sequence identity to SEQ ID NO: 13. In some embodiments, the amplicon vector comprises a sequence comprising SEQ ID NO: 13. In some embodiments, the amplicon vector comprises a sequence with at least 50% sequence identity to SEQ ID NO: 14. In some embodiments, the amplicon vector comprises a sequence comprising SEQ ID NO: 14.

[0160] In some aspects, provided herein, is a method of expressing a transgene in a cell, the method comprising contacting the cell with an HSV amplicon particle produced by any method described herein or any HSV amplicon particle described herein. In some embodiments, the contacting occurs in vivo. In some embodiments, the cell is a liver cell, a lung cell, an epithelial cell, a neural cell, a cardiac cell, a muscle cell, a stem cell, or a cancer cell. In some embodiments, the contacting occurs in vitro. In some embodiments, the cell is a human cell.

[0161] In some aspects, provided herein is a method of treating a disease or condition in a subject in need thereof, the method comprising administering to the subject therapeutically effective amount of a Herpes Simplex Virus (HSV) amplicon particle produced by any method described herein, any HSV amplicon particle described herein, or any pharmaceutical composition provided herein, wherein the therapeutically effective amount comprises an amount sufficient to infect cells of the subject such that at least one transgene is expressed in the subject.

[0162] In some embodiments, the disease or condition comprises a cancer, muscular dystrophy, non-syndromic deafness. Stargardt Disease, Leber congenital amaurosis 10, Alstrom syndrome, a glycogen storage disease, Usher Syndrome 1D, Usher Syndrome 1B, a cardiovascular disease, a neurodegenerative disease, chronic pain, a lung disease, or hemophilia. In some embodiments, the disease or condition comprises a disease or condition caused by a genetic mutation. In some embodiments, the disease or condition is a cancer. In some embodiments, the at least one transgene encodes an agent that enhances tumor killing activity. In some embodiments, the subject is a human.

[0163] In some aspects, provided herein is a use of any packaging cell line described herein or any system described herein for producing a Herpes Simplex Virus (HSV) amplicon particle. In some embodiments, the producing comprises transfecting the packaging cell line with an amplicon vector.

[0164] In some embodiments, the producing further comprises isolating the HSV amplicon particle from the packaging cell line. In some embodiments, the HSV amplicon particle comprises an HSV-1 or an HSV-2 amplicon particle. In some embodiments, the amplicon vector comprises an origin of replication (ori) and a packaging signal (pac).

[0165] In some embodiments, the amplicon vector further comprises at least one cargo nucleic acid sequence. In some embodiments, the at least one cargo nucleic acid sequence comprises a transgene. In some embodiments, the transgene comprises CRISPR associated protein 9 (Cas9), Cas3, Cas12a, Dystrophin (DYS), amylo-alpha-1, 6-glucosidase, 4-alpha-glucanotransferase (AGL), otoferlin (OTOF), myosin VIIA (MYO7A), ATP binding cassette subfamily A member 4 (ABCA4), coagulation factor VIII (F8), centrosomal protein 290 (CEP290), cadherin related 23 (CDH23), or centrosome and basal body associated protein (ALMS1). In some embodiments, the transgene comprises a gene encoding an agent for treating a cancer, muscular dystrophy, non-syndromic deafness, Stargardt Disease, Leber congenital amaurosis 10. Alstrom syndrome, a glycogen storage disease, Usher Syndrome 1D, Usher Syndrome 1B, a cardiovascular disease, a neurodegenerative disease, chronic pain, a lung disease, or hemophilia.

[0166] In some embodiments, the at least one cargo nucleic acid sequence further comprises at least one regulatory element comprising an enhancer, a promoter, a terminator, or a combination thereof. In some embodiments, the amplicon vector comprises a sequence with at least 50% sequence identity to SEQ ID NO: 1, SEQ ID NO: 11, SEQ ID NO: 12, SEQ ID NO: 13, or SEQ ID NO: 14. In some embodiments, the amplicon vector comprises a sequence comprising SEQ ID NO: 1, SEQ ID NO: 11, SEQ ID NO: 12, SEQ ID NO: 13, or SEQ ID NO: 14. In some embodiments, the amplicon vector comprises a sequence with at least 50% sequence identity to SEQ ID NO: 1. In some embodiments, the amplicon vector comprises a sequence comprising SEQ ID NO: 1. In some embodiments, the amplicon vector comprises a sequence with at least 50% sequence identity to SEQ ID NO: 11. In some embodiments, the amplicon vector comprises a sequence comprising SEQ ID NO: 11. In some embodiments, the amplicon vector comprises a sequence with at least 50% sequence identity to SEQ ID NO: 12. In some embodiments, the amplicon vector comprises a sequence comprising SEQ ID NO: 12. In some embodiments, the amplicon vector comprises a sequence with at least 50% sequence identity to SEQ ID NO: 13. In some embodiments, the amplicon vector comprises a sequence comprising SEQ ID NO: 13. In some embodiments, the amplicon vector comprises a sequence with at least 50% sequence identity to SEQ ID NO: 14. In some embodiments, the amplicon vector comprises a sequence comprising SEQ ID NO: 14.

[0167] In some aspects, provided herein is a use of a Herpes Simplex Virus (HSV) amplicon particle produced by any method described herein, any HSV amplicon particle described herein, or any pharmaceutical composition described herein for treating a disease or condition in a subject.

[0168] In some embodiments, the disease or condition comprises a cancer, muscular dystrophy, non-syndromic deafness, Stargardt Disease, Leber congenital amaurosis 10, Alstrom syndrome, a glycogen storage disease, Usher Syndrome 1D, Usher Syndrome 1B, a cardiovascular disease, a neuro-degenerative disease, chronic pain, a lung disease, or hemophilia. In some embodiments, the disease or condition comprises a disease or condition caused by a genetic mutation. In some embodiments, the disease or condition is a cancer. In some embodiments, the subject is a human.

[0169] In some aspects, provided herein is a composition comprising a recombinant genome, wherein the recombinant genome comprises: a. a first nucleic acid sequence comprising one or more Herpes Simplex Virus (HSV) Class I genes; and b. a second nucleic acid sequence comprising one or more HSV Class I and Class II genes.

[0170] In some embodiments, the first nucleic acid sequence further comprises a first one or more regulatory elements. In some embodiments, the first nucleic acid sequence is in a first genomic safe harbor site of the recombinant genome. In some embodiments, the first genomic safe harbor site comprises a Rosa26 homolog locus.

[0171] In some embodiments, the one or more HSV Class I genes comprise Infected-Cell Polypeptide 4 (ICP4), ICP27, ICP0, ICP34.5, VP16, or a combination thereof. In some embodiments, the first one or more regulatory elements comprise an enhancer, a promoter, a terminator, or a combination thereof. In some embodiments, the first one or more regulatory elements comprise the promoter. In some embodiments, the promoter comprises an inducible promoter. In some embodiments, the inducible promoter comprises a tetracycline-inducible promoter or a doxycycline-inducible promoter. In some embodiments, the inducible promoter comprises Tet-On promoter comprising TRE3G or TRE-tight.

[0172] In some embodiments, the second nucleic acid sequence is in a second genomic safe harbor site of the recombinant genome. In some embodiments, the second genomic safe harbor comprises an adeno-associated virus site 1 (AAVS1) locus.

[0173] In some embodiments, the one or more HSV Class II genes comprise UL 1, UL2, UL3, UL4, UL5, UL6, UL7, UL8, UL9, UL10, UL11, UL12, UL13, UL14, UL15, UL16, UL17, UL18, UL19, UL20, UL21, UL22, UL23, UL24, UL25, UL26, UL26.5, UL27, UL28, UL29, UL30, UL31, UL32, UL33, UL34, UL35, UL36, UL37, UL38, UL39, UL40, UL41, UL42, UL43, UL44, UL45, UL46, UL47, UL49, UL49A, UL50, UL51, UL52, UL53, UL55, UL56, US1, US2, US3, US4, US5, US6, US7, US8, US9, US10, US11, US12, or a combination thereof.

[0174] In some embodiments, the second nucleic acid sequence further comprises a second one or more regulatory elements. In some embodiments, the second one or more regulatory elements comprise an enhancer, a promoter, a terminator, or a combination thereof. In some embodiments, the second one or more regulatory elements comprise the promoter. In some embodiments, the promoter comprises a natural promoter for HSV Class II genes comprising UL1, UL2, UL3, UL4, UL5, UL6, UL7, UL8, UL9, UL10, UL11, UL12, UL13, UL14, UL15, UL16, UL17, UL18, UL19, UL20, UL21, UL22, UL23, UL24, UL25, UL26, UL26.5, UL27, UL28, UL29, UL30, UL31, UL32, UL33, UL34, UL35, UL36, UL37, UL38, UL39, UL40, UL41, UL42, UL43, UL44, UL45, UL46, UL47, UL49, UL49A, UL50, UL51, UL52, UL53, UL55, UL56, US1, US2, US3, US4, US5, US6, US7, US8, US9, US10, US11, US12, or a combination thereof.

[0175] In some embodiments, the recombinant genome does not comprise a nucleic acid sequence comprising an HSV origin of replication (ori), an HSV packaging signal (pac), or a combination thereof. In some embodiments, the recombinant genome does not comprise a nucleic acid sequence comprising oriL/S. In some embodiments, the first nucleic acid sequence comprises a sequence with at least 50% sequence identity to SEQ ID NO: 2, SEQ ID NO: 3. SEQ ID NO: 7, or SEQ ID NO: 8. In some embodiments, the first nucleic acid sequence comprises a sequence comprising SEQ ID NO: 2, SEQ ID NO: 3, SEQ ID NO: 7, or SEQ ID NO: 8. In some embodiments, the second nucleic acid sequence comprises a sequence with at least 50% sequence identity to SEQ ID NO: 5, SEQ ID NO: 6, SEQ ID NO: 9, SEQ ID NO: 10, or SEQ ID NO: 17. In some embodiments, the second nucleic acid sequence comprises a sequence comprising SEQ ID NO: 5, SEQ ID NO: 6, SEQ ID NO: 9, SEQ ID NO: 10, or SEQ ID NO: 17.

[0176] In some aspects, provided herein is a cell or a cell line comprising any composition described herein. In some embodiments, the cell or the cell line comprises a mammalian cell or a mammalian cell line. In some embodiments, the cell or the cell line comprises a Human Bone Osteo-sarcoma Epithelial (U2OS) cell, a Baby Hamster Kidney (BHK) cell, a Human Embryonic Kidney (HEK 293) cell, or an African Green Monkey Kidney (Vero) cell. In some embodiments, the cell or the cell line comprises an U2OS cell comprising ICP4 and ICP27 genes (U2OS-4/27). In some embodiments, the cell of the cell line comprises an U2OS cell comprising ICP0, ICP4, and ICP27 genes (U2OS-0-4/27).

[0177] In some aspect, provided herein is a kit comprising any composition described herein or any cell or cell line described herein and an instruction manual for using the kit. In some aspects, provided herein is a use of any composition described herein for producing a packaging cell line. In some aspects, provided herein is a method of producing a packaging cell line comprising introducing any composition described herein into a cell.

[0178] In some aspects, provided herein is a method of producing a packaging cell line comprising introducing into a cell comprising a genome: a. a first nucleic acid sequence comprising one or more Herpes Simplex Virus (HSV) Class I genes; and b. a second nucleic acid sequence comprising one or more HSV Class I and Class II genes. In some embodiments, the cell comprises a mammalian cell. In some embodiments, the mammalian cell comprises a Human Bone Osteosarcoma Epithelial (U2OS) cell, a Baby Hamster Kidney (BHK) cell, a Human Embryonic Kidney (HEK 293) cell, or an African Green Monkey Kidney (Vero) cell. In some embodiments, the U2OS cell comprises an U2OS cell comprising ICP4 and ICP27 genes (U2OS-4/27). In some embodiments, the U2OS cell comprises an U2OS cell comprising ICP0, ICP4, and ICP27 genes (U2OS-0-4/27).

[0179] In some embodiments, the first nucleic acid sequence is introduced into a first genomic safe harbor site of the genome. In some embodiments, the first genomic safe harbor site comprises a Rosa26 homolog locus.

[0180] In some embodiments, the second nucleic acid sequence is introduced into a second genomic safe harbor site of the genome. In some embodiments, the second genomic safe harbor comprises an adeno-associated virus site 1 (AAVS1) locus.

[0181] In some embodiments, the introducing comprises (i) a recombination mediated cassette exchange; (ii) a homology directed repair; or (iii) a random integration. In some embodiments, (ii) the homology directed repair comprises (a) a homology directed repair following a targeted double strand break generated by an endonuclease or (b) a homology directed repair with long homology arms and naturally occurring double strand breaks. In some embodiments, the endonuclease comprises a Clustered regularly interspaced short palindromic repeats (CRISPR)-CRISPR-associated protein 9 (Cas9), a zinc finger nuclease, or a transcription activator-like effector nuclease (TALEN).

[0182] In some embodiments, (b) the homology directed repair with long homology arms and naturally occurring double strand breaks further comprises selection with a marker. In some embodiments, (iii) the random integration further comprises a selection with a marker. In some embodiments, the marker comprises LacZ, CAT, HPRT1, PIGA, Luciferase, GFP, YFP, RFP, iRFP, EGFP, blasticidin, neomycin/G418, hygromycin, puromycin, or zeocin.

[0183] In some embodiments, the first nucleic acid sequence further comprises a first one or more regulatory elements. In some embodiments, the one or more HSV Class I genes comprise Infected-Cell Polypeptide 4 (ICP4), ICP27, ICP0, ICP34.5, VP16, or a combination thereof. In some embodiments, the first one or more regulatory elements comprise an enhancer, a promoter, a terminator, or a combination thereof. In some embodiments, the first one or more regulatory elements comprise the promoter. In some embodiments, the promoter comprises an inducible promoter. In some embodiments, the inducible promoter comprises a tetracycline-inducible promoter or a doxycycline-inducible promoter. In some embodiments, the inducible promoter comprises Tet-On promoter comprising TRE3G or TRE-tight.

[0184] In some embodiments, the one or more HSV Class II genes comprise UL 1, UL2, UL3, UL4, UL5, UL6, UL7, UL8, UL9, UL10, UL11, UL12, UL13, UL14, UL15, UL16, UL17, UL18, UL19, UL20, UL21, UL22, UL23, UL24, UL25, UL26, UL26.5, UL27, UL28, UL29, UL30, UL31, UL32, UL33, UL34, UL35, UL36, UL37, UL38, UL39, UL40, UL41, UL42, UL43, UL44, UL45, UL46, UL47, UL49, UL49A, UL50, UL51, UL52, UL53, UL55, UL56, US1, US2, US3, US4, US5, US6, US7, US8, US9, US10, US11, US12, or a combination thereof.

[0185] In some embodiments, the second nucleic acid sequence further comprises a second one or more regulatory elements. In some embodiments, the second one or more regulatory elements comprise an enhancer, a promoter, a terminator, or a combination thereof. In some embodiments, the second one or more regulatory elements comprise the promoter. In some embodiments, the promoter comprises a natural promoter for HSV Class II genes comprising UL1, UL2, UL3, UL4, UL5, UL6, UL7, UL8, UL9, UL10, UL11, UL12, UL13, UL14, UL15, UL16, UL17, UL18, UL19, UL20, UL21, UL22, UL23, UL24, UL25, UL26, UL26.5, UL27, UL28, UL29, UL30, UL31, UL32, UL33, UL34, UL35, UL36, UL37, UL38, UL39, UL40, UL41, UL42, UL43, UL44, UL45, UL46, UL47, UL49, UL49A, UL50, UL51, UL52, UL53, UL55, UL56, US1, US2, US3, US4, US5, US6, US7, US8, US9, US10, US11, US12, or a combination thereof.

[0186] In some embodiments, the genome does not comprise a nucleic acid sequence comprising an HSV origin of replication (ori), an HSV packaging signal (pac), or a combination thereof. In some embodiments, the genome does not comprise a nucleic acid sequence comprising oriL/S.

[0187] In some embodiments, the first nucleic acid sequence and/or the second nucleic acid sequence is comprised in a vector. In some embodiments, the vector is selected from the group consisting of a DNA, an RNA, a plasmid, a lentivirus vector, adenoviral vector, a Rous sarcoma viral (RSV) vector, and a retrovirus vector.

### EXAMPLES

[0188] These examples are provided for illustrative purposes only and not to limit the scope of the claims provided herein.

### Example 1: Preparation of the Packaging Cell Line

[0189] A REWRITE landing pad can be inserted into the Rosa26 homolog locus and the AAVS1 locus of a U2OS cell line. A cassette of HSV Class I genes described herein (ICP4, ICP27, ICP0, ICP34.5, and/or VP16) with an inducible promoter can be inserted to the REWRITE landing pad in the Rosa26 homolog locus. Next, a cassette of HSV Class II genes described herein (UL1, UL2, UL3, UL4, UL5, UL6, UL7, UL8, UL9, UL10, UL11, UL12, UL13, UL14, UL15, UL16, UL17, UL18, UL19, UL20, UL21, UL22, UL23, UL24, UL25, UL26, UL26.5, UL27, UL28, UL29, UL30, UL31, UL32, UL33, UL34, UL35, UL36, UL37, UL38, UL39, UL40, UL41, UL42, UL43, UL44, UL45, UL46, UL47, UL49, UL49A, UL50, UL51, UL52, UL53, UL55, UL56, US1, US2, US3, US4, US5, US6, US7, US8, US9, US10, US11, and/or US12), with their natural promoter, can be inserted into the REWRITE landing pad in the AAVS1 locus.

[0190] Using PCR and RNAseq, the expression of HSV Class I and Class II genes can be confirmed. Using single-gene deletion HSV vectors, functional complementation of HSV Class I and Class II genes can be confirmed. For example, plaque formation when HSV vectors lacking either UL 15 or UL17 are transfected into the packaging cell line that encodes HSV Class I and Class II genes including UL 15 and UL 17 can confirm functional complementation of UL 15 or UL17, demonstrating relocating HSV Class I and Class II genes into the genome of the packaging cell line does not affect the expression of HSV Class I and Class II genes.

### Example 2: HSV Amplicon Particles in Immunotherapy

[0191] HSV amplicon produced by methods described herein can improve the efficiency of engineering the genome of primary immune cells, including T cells and NK cells, which are both critically important for modern cell therapies. For example, as the field moves towards “off-the-shelf products” and sourcing cells from healthy donors, substantial engineering can be required both to install the therapeutic payload and to overcome immunological barriers and improve engraftment.

[0192] More specifically, engineering steps can target two major goals: (1) installation of one or more therapeutic genes (e.g., a chimeric antigen receptors, or CARs); and (2) genetic changes to improve engraftment of therapeutic cells inside the patient (e.g., (a) deleting the T-cell receptor alpha/beta locus (TRAC) to eliminate graft versus host disease, (b) deleting beta-2-microglobulin to eliminate cell surface expression of HLA Class I molecules and eliminate host versus graft disease; and (c) installation of a constitutively expressed HLA-E or HLA-G gene to minimize natural killer cell-mediated loss of therapeutic cells). At least 3 bi-allelic edits encompassing a series of knock-out and knock-in changes can be required. Importantly, the ability to deliver longer payloads via HSV particles described herein can provide several advantages: (1) nuclease system (e.g., TALEN, CRISPR-Cas9, zinc finger) can be encoded genetically together with all of the donor DNAs for homology directed repair (HDR), ensuring that a single transduction event results in co-delivery of all of the sequences required for editing; (2) the HDR DNAs can be substantially longer and encode natural regulatory information and/or introns to enable tissue enhanced transcriptional regulation); and (3) the HSV amplicon system can offer high transduction efficiency and for example, a lower titer may be necessary, compared to lentivirus vector or AAV vector.

### Example 3: Packaging Cell Line Generation and Validation I

### Insertion of UL19, UL20, and UL21 at a REWRITE Landing Pad Located at the AAVS1 Locus (GSH2)

[0193] As shown in FIG. 2A, a gene cassette containing HSV class II genes (UL19, UL20, and UL21) flanked by heterotypic Lox sites was constructed in a REWRITE-compatible payload vector (mPAV-UL19-21-Zeo; SEQ ID NO: 17), and delivered to the REWRITE landing pad (SEQ ID NO: 4) at AAVS1 (GSH2) via recombinase mediated cassette exchange (RMCE) in U2OS-4/27 cells. U2OS-4/27 is a packaging cell line stably transduced to express IE175 (ICP4) and UL54 (ICP27) genes (see Miyagawa Y, et al. Herpes simplex viral-vector design for efficient transduction of nonneuronal cells without cytotoxicity Proc Natl Acad Sci USA. 2015 Mar. 31; 112(13): E1632-E1641) and used to complement JDNI8-4 vector (JDNI8-4. HSV-KOS deleted for ICP0, ICP4, ICP27 and JOINT region; see Miyagawa Y, et al. Deletion of the Virion Host Shut-off Gene Enhances Neuronal-Selective Transgene Expression from an HSV Vector Lacking Functional IE Genes. Mol Ther Methods Clin Dev. 2017 Jun. 16; 6:79-90). Briefly, a plasmid containing tamoxifen-induced Cre-recombinase was co-delivered with the payload vector by Nucleofection using the Nucleofector SE Kit (Lonza) as described by the manufacturer's protocol. U2OS-4/27 cells comprising REWRITE Landing Pad were collected by trypsinization, counted, and prepared in the Nucleofection Buffer as suspensions of 1×10⁶ cells per nucleofection condition. DNAs were prepared for co-delivery in equimolar amounts of 0.26 pmol per delivery. Following nucleofection, 1×10⁵ cells were taken from the population and plated in 10 cm dishes as technical duplicates. Cre recombination of the transgenic payload into the GSH landing pad began 24 hours post-nucleofection with the addition of 250 nM Tamoxifen (Sigma) into complete Dubecco's Modified Eagle Media (Gibco) (DMEM, 10% FBS, 1% Pen-strep) for 48 hours. After the recombination period, cell populations were selected in complete DMEM (Gibco) supplemented with 500 μg/ml Zeocin antibiotic (Milipore Sigma) to select for successful integrants.

[0194] Following selection for successful integration of the payload containing HSV class II genes (UL19, UL20, and UL21 or UL19-21) at the REWRITE landing pad with Zeocin, U2OS-4/27+UL19-21 cells were pooled, and genomic DNA was extracted. Genomic DNA was used to construct whole-genome sequencing (WGS) libraries using the Illumina DNA library protocol (Illumina, Cat #20060059). In order to enhance the detection of transgene insertions into the cellular genome, biotinylated probes were prepared from transfected plasmids by Nick Translation (Roche) according to the manufacturer's protocol. Probes were assessed for size by resolving on a 2.0% agarose gel. Concentrations of prepared probes were assessed by Qubit HS dsDNA Assay (Thermo). WGS libraries were enriched for the target region by incubation with the prepared biotinylated DNA probes as previously described in Brosh et al, Molecular Cell 83(7):1140-1152 (2023), and the resulting Capture-seq library was purified and sequenced on an Illumina Nextseq 2000 instrument. Capture-seq reads were mapped to the reference Fasta file (AAVS1-UL19-21-insert; SEQ ID NO: 15), and output barn files were used to visualize read coverage over the payload insertion region at AAVS1 in IGV_2.14.1. An exemplary readout of whole-genome sequencing (WGS) after enrichment for sequences (Capture-seq) at the AAVS1 genome and sequences contained in the synHSV93 genome in the U2OS-4/27+UL19-21 cells was shown in FIG. 2B.

[0195] This experiment demonstrates the successful preparation of U2OS-4/27+UL19-21 packaging cells.

### Complementation of ICP4 (IE175 Gene) and ICP27 (UL54 Gene) in U2OS-4/27+UL19-21 Cells

[0196] Pooled clones of U2OS-4/27+UL19-21 cells were replated at clonal density, and individual clones were picked and expanded in culture. U2OS-4/27 cells, U2OS-4/27+REWRITE Landing Pad cells, U2OS-4/27+UL19-21 pooled clones, and U2OS4/27+UL19-21 individual clones were plated in 48-well plates (4×10⁴ cells/well) and subsequently infected with the replication-deficient JDNI8-4 HSV vector at multiplicity of infection (MOI) of 0.0005 pfu/cell. Representative fluorescent images of JDNI8-4 plaques for each cell line at 5 days post-infection (dpi) were obtained with a Nikon Diaphot fluorescence microscope (Nikon) at 5× magnification, as shown in FIG. 3A.

[0197] Next, U2OS-4/27 and U2OS-4/27+UL19-21 clones were plated in 48-well plates and infected with serial dilutions of JDNI8-4 HSV vector. Two hours post-infection the cells were overlayed with methylcellulose. Titer was determined by plaque count at 9 dpi and normalized to the titer obtained in the U2OS-4/27 packaging line. See FIG. 3B.

[0198] These experiments demonstrate that U2OS-4/27+UL19-21 cells package JDNI8-4 HSV virus vector with similar efficiency to parental U2OS-4/27 cells.

### Complementation of VP 5 (UL19 Gene) in U2OS-4/27+UL19-21 Cells

[0199] Complementation of VP5 (UL19 gene) in U2OS-4/27+UL19-21 cells was tested by infection with a replication competent virus deleted for UL19 gene (ΔVP5; HSV-KOS deleted for VP5/UL19 gene; see Desai P, et al. Mutations in herpes simplex virus type 1 genes encoding VP5 and VP23 abrogate capsid formation and cleavage of replicated DNA. J Virol. 1993 March; 67(3):1357-64). U2OS-4/27+UL19-21 clones, Vero G5 (packaging cell line stably transduced to express UL16-UL21 HSV genes and used to complement ΔVP5 virus), U2OS-4/27, and Vero (negative controls) were plated in 48-well plates (4×10⁴ cells/well). Cells were infected with serial dilution of ΔVP5 HSV virus. Representative images of ΔVP5 HSV virus plaques were taken at 2 dpi with a Nikon Diaphot microscope (Nikon) at 5× magnification as shown in FIG. 4.

[0200] ΔVP5 HSV virus pfu titer in U2OS-4/27+UL19-21 clones and Vero G5 cells were compared, and results are shown in FIGS. 5A and 5B.

[0201] This experiment demonstrates that U2OS-4/27+UL19-21 cells package ΔVP5 HSV virus with similar efficiency to Vero G5 cells.

### Complementation of VP5 (UL19 Gene), UL20p (UL20 Gene), and UL21 (UL21 Gene) in U2OS-4/27+UL19-21 Clones

[0202] Complementation of VP5 (UL19 gene), UL20p (UL20 gene), and UL21 (UL21 gene) in U2OS-4/27+UL19-21 cells was tested by infection with a replication deficient mutant HSV vector additionally deleted for UL19-UL21 genes. JDNI8-ΔUL19-UL21 (SEQ ID NO: 11). U2OS-4/27+UL19-21 clones were plated in 6-well plates at (3×10⁵ cell/well) and transfected with 2 μg of JDNI8-AUL19-UL21 vector DNA. Representative fluorescent pictures of JDNI8-ΔUL19-UL21 plaques taken 10 days post-transfection (dpt) are shown FIG. 6A. Pictures were obtained with a Nikon Diaphot fluorescence microscope (Nikon) at 5× magnification (upper panel, brightfield; lower panel, mCherry).

[0203] For propagation of the JDNI8-ΔUL19-UL21 vector on U2OS-4/27+UL19-21 clones, cells were plated in 6-well plates and infected with supernatant recovered from U2OS-4/27+UL19-21 transfected with JDNI8-ΔUL19-UL21 vector. FIG. 6B shows a representative picture of U2OS-4/27+UL19-21 clone 18 infection at 15 dpi.

[0204] This experiment demonstrates that U2OS-4/27+UL19-21 cells package JDNI8-ΔUL19-UL21 HSV virus efficiently, and the resulting HSV amplicon particles can be used for re-passaging to increase titer.

### Example 4: Packaging Cell Line Generation and Validation II

Insertion of synHSV128 Genome at a REWRITE Landing Pad Located at the AAVS1 Locus (GSH2)

[0205] A gene cassette containing HSV class I and II genes was constructed in a REWRITE-compatible payload vector (synHSV128_Puro; SEQ ID NO: 9). synHSV128_Puro vector comprises HSV II genes, UL19-UL56 and US1-US11 under their native promoters; HSV I genes, VP16 under TRE3GS promoter and ICP34.5 under a CMV promoter; Yellow Fluorescent Protein (YFP) gene; and Puromycin resistance gene, synHSV128_Puro vector does not comprise on or pac sequences. The DNA payload was delivered to the REWRITE landing pad (SEQ ID NO: 4) at AAVS1 (GSH2) in U2OS cells by co-transfection with a plasmid containing a tamoxifen-induced Cre-recombinase to induce recombinase mediated cassette exchange (RMCE) integration. DNAs were prepared for transfection in equimolar amounts at 0.26 pmol per DNA. 24 hours prior to transfection, 2×10⁵ cells were plated into 6-well plate format. Co-transfection was performed using the FuGene HD reagent in a 1:1 reagent to total DNA volumetric ratio. 24 Hours post transfection, cells were treated with 250 nM tamoxifen to induce Cre-driven recombination at the REWRITE Landing Pad site. Acute exposure to tamoxifen was carried out for 48 hours. Following the recombination period, cell populations were given an additional 48 hours to recover in complete DMEM. Following the recovery period, antibiotic selection was performed for 14 days in DMEM supplemented with 1 μg/ml puromycin. A schematic drawing of the synthetic genome integrated at GSH2 is shown in FIG. 7A.

[0206] Following selection for successful integration of the payload at the REWRITE landing pad with puromycin, single cell derived clones of U2OS+synHSV128 cells were isolated and propagated. For screening and cell line characterization, genomic DNA was extracted using the DNEasy Blood and Tissue Kit (Qiagen). Genomic DNA was then used to construct whole-genome sequencing (WGS) libraries using the Integrated DNA Technologies ExGen DNA EZ Kit (IDT. Cat #10009863). WGS libraries were enriched for the target region using biotinylated DNA probes as previously described. The resulting Capture-seq libraries were sequenced on an Illumina Nextseq 2000 instrument. Capture-seq reads were mapped to the reference Fasta file (AAVS1-synHSV128-insert; SEQ ID NO: 16), and output bam files were used to visualize read coverage over the payload insertion region at AAVS1 in IGV_2.14.1. An exemplary readout of whole-genome sequencing (WGS) after enrichment for sequences (Capture-seq) at the AAVS1 genome and sequences contained in the synHSV128 genome in U2OS+synHSV128 is shown in FIG. 7B.

Complementation of Replication Competent HSV Viruses with synHSV128 Packaging Cells

[0207] Complementation of a ΔVP5 (UL19) HSV replication competent vector virus (ΔVP5; HSV-KOS deleted for VP5 gene) in U2OS+synHSV128 packaging cells was tested. U2OS+synHSV128 packaging cells were plated in 48-well plates and infected with serial dilution of ΔVP5 HSV virus. Representative pictures of ΔVP5 HSV virus plaques were taken at 7 dpi are shown in FIG. 8A.

[0208] Next, complementation of a ΔgD (US6 gene) replication competent virus (ΔgD; HSV-KOS deleted for gD/US6 gene; see Ligas M W, Johnson DC. A herpes simplex virus mutant in which glycoprotein D sequences are replaced by beta-galactosidase sequences binds to but is unable to penetrate cells. J Virol. 1988 May; 62(5):1486-94) in Vero VD60 (ΔgD virus packaging cells, a cell line stably transduced to express gD/US6 gene), U2OS-synHSV128, and Vero cells (negative control) was tested. ΔgD virus was grown on VD60 cells upon transfection. Transfection supernatant was collected at 9 days post transfection and serial dilutions of the supernatant were used to infect Vero VD60 (ΔgD virus packaging cell line), U2OS-synHSV128, and Vero cells. Representative images were captured at 2 dpi and 5 dpi as shown in FIG. 8B.

[0209] This experiment demonstrates that U2OS-synHSV128 cells package replication defective HSV viruses ΔVP5 and ΔgD efficiently.

### Example 5: Packaging Cell Line Generation and Validation III

[0210] A vector comprising human codon-optimized Immediate Early Genes ICP0, ICP4, and ICP27 genes under the control of the TRE-tight promoter (TRE-ICP0-4-27; SEQ ID NO: 8) can be constructed. This construct can be then prepared for genomic integration by introducing homology arms targeting the syntenic human Rosa26 locus in 3 different cell lines: 1) U2OS cells comprising the REWRITE landing pad at GSH2; 2) U2OS-4/27+UL19-21 (U2OS-4/27 cell line comprising UL19-21 genes inserted in landing pad at GSH2; see Example 3), and 3) U2OS+synHSV128 (U2OS cell line comprising synHSV128 integrated at GSH2; see Example 4). Genomic integrations of TRE-ICP0-4/27 can be performed by co-nucleofection of the payload plasmid with a Cas9-expressing plasmid containing a guide RNA sequence corresponding to an intronic sequence within the ROSA26 locus. Co-nucleofection of DNAs can be performed using the Nucleofector SE Kit (Lonza) as described by the manufacturer's protocol. Cells can be collected by trypsinization, counted, and prepared in the provided Nucleofection Buffer as suspensions of 1×10⁶ cells per nucleofection condition. DNAs can be prepared for co-delivery in equal amounts of 2 μg per delivery. In addition, a single-stranded oligodeoxynucleotide (ssODN) can be added at a concentration of 200 nM. Following nucleofection, 1×10⁵ cells can be taken from the population and plated in 10 cm dishes as technical duplicates. Cell populations can be selected in complete DMEM (10% FBS, 1% P/S)+1 μg/ml puromycin to enrich for those cells within the population that take up the Cas9 plasmid. Puromycin selective pressure can be applied for 48 hours. After 48 hours selective pressure can be changed to neomycin (G418) (500 Dg/ml) to enrich for the presence of the TRE-ICP0-4/27 integration. Selection with G418 can be carried out for 10 days. Genomic DNA from the cell line can be extracted using the Qiagen DNAEasy Kit (Qiagen). Pooled transfectant genomic DNA samples can be screened for integration of TRE-ICP0/4/27 by PCR.

[0211] The resulting U2OS-0-4/27 cells can be tested for complementation of HSV vectors, e.g., JDN18-4, JDNI8-ΔUL19-21 (SEQ ID NO:11), and/or SEQ ID NO: 13, by infecting the cells with the HSV vector. U2OS-0-4/27 clones can be plated in 6-well plates at (3×10⁵ cell/well) and transfected with 2 μg of the HSV vector DNA.

[0212] For propagation of the HSV vector on U2OS-0-4/27 clones, cells will be plated in 6-well plates and infected with supernatant recovered from U2OS-0-4/27 transfected with the HSV vector.

[0213] It is expected that that U2OS-0-4/27 cells will package the HSV virus efficiently, and the resulting HSV amplicon particles can be used for re-passaging to increase titer.

### Example 6: Sequence Listing

TABLE 1
Description of Sequences

| SEQ | | |
|---|---|---|
| ID | | |
| NO: | Name of sequence | Description |
| 1 | AmpliconVector_synHSV_{—} | An amplicon vector comprising |
| | 93 | HSV Class II genes UL1-UL19, |
| | | HSV Class I gene VP16, |
| | | mCherry, ori, and pac |
| | | sequences. |
| 2 | GSH1_ClassI_v1_TRE- | A construct integrated at GSH 1 |
| | ICP0-4-27 | via Cas9-mediated double strand |
| | | break (DSB), comprising a tet- |
| | | inducible (TRE3GS promoter) |
| | | gene cassette that drives |
| | | expression of codon-optimized |
| | | ICP0, ICP4, and ICP27 genes on |
| | | a single transcript, separated by |
| | | P2A cleavage signals. |
| 3 | GSH1_ClassI_v2_TRE- | A construct integrated at GSH 1 |
| | ERT2-ICP0-4-27 | via Cas9-mediated double strand |
| | | break (DSB), comprising a tet- |
| | | inducible (TRE promoter) gene |
| | | cassette that drives expression of |
| | | codon-optimized ICP0-ERT2, |
| | | ICP4-ERT2, and ICP27-ERT2 |
| | | genes on a single transcript, |
| | | separated by P2A cleavage |
| | | signals. |
| 4 | GSH2_ClassII_{—} | Landing pad sequence |
| | LandingPadSequence | |
| 5 | GSH2_ClassII_synHSV_{—} | A synthetic HSV genome for |
| | 93 | RMCE integration at the landing |
| | | pad (SEQ ID NO: 4) at GSH2 for |
| | | construction of the packaging |
| | | cell line; comprises HSV class I |
| | | gene ICP34.5 driven by a CMV |
| | | promoter; Class II genes UL19- |
| | | UL56, US1-US11 with their |
| | | native promoters; YFP gene; |
| | | Zeocin resistance gene; does not |
| | | comprise ori/pac sequences. |
| 6 | AmpliconVector_additional_{—} | A construct comprising HSV |
| | HSV_ClassII | class I gene ICP34.5 with its |
| | | native promoter; Class II genes |
| | | UL19-UL56, US1-US11 with |
| | | their native promoters; does not |
| | | comprise ori/pac sequences. |
| 7 | TRE-Tight-0-4-27-VP16- | A construct integrated at GSH 1 |
| | ROSA26HAs | via Cas9-mediated double strand |
| | | break (DSB), comprising: a tet- |
| | | inducible (TRE-tight promoter) |
| | | gene cassette that drives |
| | | expression of codon-optimized |
| | | ICP0, ICP4, and ICP27 genes on |
| | | a single transcript, separated by |
| | | P2A cleavage signals; a tet- |
| | | inducible VP16 gene cassette; |
| | | and homology arms to target |
| | | integration of these set-inducible |
| | | genes to the Rosa26 locus. This |
| | | construct can be used for the |
| | | generation of the packaging cell |
| | | line. |
| 8 | TRE-Tight-0-4-27_{—} | A construct integrated at GSH 1 |
| | ROSA26_HomologyArm_{—} | via Cas9-mediated double strand |
| | Assembly | break (DSB), comprising: a tet- |
| | | inducible (TRE-tight promoter) |
| | | gene cassette that drives |
| | | expression of codon-optimized |
| | | ICP0, ICP4, and ICP27 genes on |
| | | a single transcript, separated by |
| | | P2A cleavage signals; and |
| | | homology arms to target |
| | | integration of these set-inducible |
| | | genes to the Rosa26 locus. This |
| | | construct can be used for the |
| | | generation of the packaging cell |
| | | line. |
| 9 | SynHSV128_Puro | A synthetic HSV genome for |
| | | RMCE integration at the landing |
| | | pad (SEQ ID NO: 4) at GSH2 for |
| | | construction of the packaging |
| | | cell line. This synthetic HSV |
| | | genome comprises HSV class I |
| | | genes (TRE3GS-VP16, and |
| | | ICP34.5 driven by a CMV |
| | | promoter); Class II genes (UL19- |
| | | UL56 and US1-US11 under |
| | | native promoter); YFP gene; |
| | | Puromycin resistance gene; and |
| | | does not comprise ori/pac |
| | | sequences. |
| 10 | SynHSV128_ΔVP16 | A synthetic HSV genome for |
| | | RMCE integration at the landing |
| | | pad (SEQ ID NO: 4) at GSH2 for |
| | | construction of the packaging |
| | | cell line. This synthetic HSV |
| | | genome comprises HSV class I |
| | | gene (ICP34.5 driven by a CMV |
| | | promoter); Class II genes (UL19- |
| | | UL56 and US1-US11 under |
| | | native promoter); YFP gene; |
| | | Puromycin resistance gene; and |
| | | does not comprise ori/pac |
| | | sequences. |
| 11 | JDNI8-ΔUL19-21 | A replication-deficient HSV |
| | | vector comprising deletion of |
| | | UL19/UL20/UL21 genes. This |
| | | vector has capacity for 45 kb of |
| | | DNA payload, and can be |
| | | transfected into a packaging cell |
| | | line to produce replication- |
| | | deficient virus. |
| 12 | JDNI5-ΔUL19-21 | A replication-deficient HSV |
| | | vector comprising deletion of |
| | | UL19/UL20/UL21/UL41 genes. |
| | | This vector has capacity for 45 kb |
| | | of DNA payload, and can be |
| | | transfected into a packaging cell |
| | | line to produce replication- |
| | | deficient virus. |
| 13 | AmpVec_VP16-4-27 | An amplicon vector comprising |
| | | VP16 driven by EF1alpha |
| | | promoter; ICP4 and ICP27 on |
| | | their native promoters; pac/ori |
| | | sequences; Flag-tagged |
| | | Luciferase driven by CAG |
| | | promoter; and GFP driven by |
| | | the oriS + IE4/5 promoter. |
| 14 | AmpVec_4-27 | An amplicon vector comprising |
| | | ICP4 and ICP27 on their native |
| | | promoters; pac/ori sequences; |
| | | Flag-tagged Luciferase driven by |
| | | CAG promoter; and GFP driven |
| | | by the oriS + IE4/5 promoter. |
| 15 | AAVS1-UL19-21-insert | AAVS1-UL19-21-insert |
| | | reference sequence used for |
| | | mapping (Example 3) |
| 16 | AAVS1-synHSV128-insert | AAVS1-synHSV128-insert |
| | | reference sequence used for |
| | | mapping (Example 4) |
| 17 | mPAV-UL19-21-Zeo | A vector comprising HSV class |
| | | II genes (UL19, UL20, and |
| | | UL21) flanked by heterotypic |
| | | Lox sites, Zeocin resistance gene, |
| | | and YFP gene for integration into |
| | | GSH2 |

What is claimed is:

1. A packaging cell line comprising a recombinant genome, wherein the recombinant genome comprises:
a. a first nucleic acid sequence comprising one or more Herpes Simplex Virus (HSV) Class I genes; and
b. a second nucleic acid sequence comprising one or more HSV Class I and Class II genes.

2. The packaging cell line of claim 1, wherein the first nucleic acid sequence further comprises a first one or more regulatory elements.

3. The packaging cell line of claim 1, wherein the first nucleic acid sequence is in a first genomic safe harbor site of the recombinant genome.

4. The packaging cell line of claim 3, wherein the first genomic safe harbor site comprises a Rosa26 homolog locus.

5. The packaging cell line of claim 1, wherein the one or more HSV Class I genes comprise Infected-Cell Polypeptide 4 (ICP4), ICP27, ICP0, ICP34.5, VP16, or a combination thereof.

6. The packaging cell line of claim 2, wherein the first one or more regulatory elements comprise an enhancer, a promoter, a terminator, or a combination thereof.

7. The packaging cell line of claim 6, wherein the first one or more regulatory elements comprise the promoter.

8. The packaging cell line of claim 7, wherein the promoter comprises an inducible promoter.

9. The packaging cell line of claim 8, wherein the inducible promoter comprises a tetracycline-inducible promoter or a doxycycline-inducible promoter.

10. The packaging cell line of claim 9, wherein the inducible promoter comprises Tet-On promoter comprising TRE3G or TRE-tight.

11. The packaging cell line of claim 1, wherein the second nucleic acid sequence is in a second genomic safe harbor site of the recombinant genome.

12. The packaging cell line of claim 11, wherein the second genomic safe harbor comprises an adeno-associated virus site 1 (AAVS1) locus.

13. The packaging cell line of claim 1, wherein the one or more HSV Class II genes comprise UL1, UL2, UL3, UL4, UL5, UL6, UL7, UL8, UL9, UL10, UL 11, UL12, UL13, UL14, UL15, UL16, UL17, UL18, UL19, UL20, UL21, UL22, UL23, UL24, UL25, UL26, UL26.5, UL27, UL28, UL29, UL30, UL31, UL32, UL33, UL34, UL35, UL36, UL37, UL38, UL39, UL40, UL41, UL42, UL43, UL44, UL45, UL46, UL47, UL49, UL49A, UL50, UL51, UL52, UL53, UL55, UL56, US1, US2, US3, US4, US5, US6, US7, US8, US9, US10, US11, US12, or a combination thereof.

14. The packaging cell line of claim 1, wherein the second nucleic acid sequence further comprises a second one or more regulatory elements.

15. The packaging cell line of claim 14, wherein the second one or more regulatory elements comprise an enhancer, a promoter, a terminator, or a combination thereof.

16. The packaging cell line of claim 15, wherein the second one or more regulatory elements comprise the promoter.

17. The packaging cell line of claim 16, wherein the promoter comprises a natural promoter for HSV Class II genes comprising UL1, UL2, UL3, UL4, UL5, UL6, UL7, UL8, UL9, UL10, UL11, UL12, UL13, UL14, UL15, UL16, UL17, UL18, UL19, UL20, UL21, UL22, UL23, UL24, UL25, UL26, UL26.5, UL27, UL28, UL29, UL30, UL31, UL32, UL33, UL34, UL35, UL36, UL37, UL38, UL39, UL40, UL41, UL42, UL43, UL44, UL45, UL46, UL47, UL49, UL49A, UL50, UL51, UL52, UL53, UL55, UL56, US1, US2, US3, US4, US5, US6, US7, US8, US9, US10, US11, US12, or a combination thereof.

18. The packaging cell line of claim 1, wherein the recombinant genome does not comprise a nucleic acid sequence comprising an HSV origin of replication (ori), an HSV packaging signal (pac), or a combination thereof.

19. The packaging cell line of claim 1, wherein the recombinant genome does not comprise a nucleic acid sequence comprising oriL/S.

20. The packaging cell line of claim 1, wherein the first nucleic acid sequence comprises a sequence with at least 50% sequence identity to SEQ ID NO: 2, SEQ ID NO: 3, SEQ ID NO: 7, or SEQ ID NO: 8.

21. The packaging cell line of claim 20, wherein the first nucleic acid sequence comprises a sequence comprising SEQ ID NO: 2, SEQ ID NO: 3, SEQ ID NO: 7, or SEQ ID NO: 8.

22. The packaging cell line of claim 1, wherein the second nucleic acid sequence comprises a sequence with at least 50% sequence identity to SEQ ID NO: 5, SEQ ID NO: 6, SEQ ID NO: 9, SEQ ID NO: 10, or SEQ ID NO: 17.

23. The packaging cell line of claim 22, wherein the second nucleic acid sequence comprises a sequence comprising SEQ ID NO: 5, SEQ ID NO: 6, SEQ ID NO: 9, SEQ ID NO: 10, or SEQ ID NO: 17.

24. The packaging cell line of claim 1, wherein the packaging cell line comprises a mammalian cell line.

25. The packaging cell line of claim 24, wherein the packaging cell line is a Human Bone Osteosarcoma Epithelial (U2OS) cell line, a Baby Hamster Kidney (BHK) cell line, a Human Embryonic Kidney (HEK 293) cell line, or an African Green Monkey Kidney (Vero) cell line.

26. The packaging cell line of claim 25, wherein the U2OS cell line comprises U2OS cells comprising ICP4 and ICP27 genes (U2OS-4/27).

27. The packaging cell line of claim 25, wherein the U2OS cell line comprises U2OS cells comprising ICP0, ICP4, and ICP27 genes (U2OS-0-4/27).

28. A system for producing a Herpes Simplex Virus (HSV) amplicon particle comprising:
a. the packaging cell line of any one of claims 1-27; and
b. an amplicon vector.

29. The system of claim 28, wherein the amplicon vector comprises at least one cargo nucleic acid sequence.

30. The system of claim 29, wherein the at least one cargo nucleic acid sequence comprises from about 10 to about 150 kb.

31. The system of claim 29, wherein the at least one cargo nucleic acid sequence comprises up to 100 kb.

32. The system of any one of claims 29-31, wherein the at least one cargo nucleic acid sequence is inserted site-specifically in the amplicon vector by restriction enzyme digestion cloning, Golden Gate Assembly, in vitro Cas9 digestion followed by Gibson assembly, Gateway cloning, or in yeasto recombination assembly.

33. The system of claim 32, wherein the at least one cargo nucleic acid sequence is inserted by restriction enzyme digestion cloning using one or more restriction enzyme sites comprising PacI, BbsI, BbsI-HF, BcoDI, BsaI-HF, BsmBI-v2, BsmI, BspQI, BsrDI, BsrI, BtsI-v2, BtsIMutI, EarI, Esp3I, SapI, AcuI, BaeI, BcgI, BpmI, BpuEI, BsaXI, BseRI, BsgI, BsmFI, BspCNI, BtgZI, CspCI, EcI, I, MmeI, NmeAIII, AwI, BbvI, BccI, BceAI, BcI, VI, BfuAI, BmrI, BsmAI, BspMI, BtsCI, FauI, FokI, HgaI, HphI, HpyAV, MboII, MlyI, MnlI, PaqCI, PleI, SfaNI, I-CeuI, I-SceI, PI-PspI, PI-SceI, PmeI, or a combination thereof.

34. The system of claim 32, wherein the at least one cargo nucleic acid sequence is inserted by Gateway cloning using one or more Gateway cloning sites comprising attR1, attR2, or a combination thereof.

35. The system of claim 32, wherein the at least one cargo nucleic acid sequence is inserted by in yeasto recombination assembly using one or more in yeasto recombination sites comprising NeoLVec, NeoRVec, or a combination thereof.

36. The system of claim 32, wherein the at least one cargo nucleic acid sequence is inserted by in vitro Cas9 digestion followed by Gibson assembly using a Cas9 gRNA sequence.

37. The system of any one of claims 29-36, wherein the at least one cargo nucleic acid sequence comprises a transgene.

38. The system of claim 37, wherein the transgene comprises CRISPR associated protein 9 (Cas9), Cas 3, Cas12a, Dystrophin (DYS), amylo-alpha-1, 6-glucosidase, 4-alpha-glucanotransferase (AGL), otoferlin (OTOF), myosin VIIA (MYO7A), ATP binding cassette subfamily A member 4 (ABCA4), coagulation factor VIII (F8), centrosomal protein 290 (CEP290), cadherin related 23 (CDH23), or centrosome and basal body associated protein (ALMS1).

39. The system of claim 37, wherein the transgene comprises a gene encoding an agent for treating a cancer, muscular dystrophy, non-syndromic deafness, Stargardt Disease, Leber congenital amaurosis 10, Alstrom syndrome, a glycogen storage disease, Usher Syndrome 1D, Usher Syndrome 1B, a cardiovascular disease, a neurodegenerative disease, chronic pain, a lung disease, or hemophilia.

40. The system of any one of claims 29-39, wherein the at least one cargo nucleic acid sequence further comprises at least one regulatory element comprising an enhancer, a promoter, a terminator, or a combination thereof.

41. The system of any one of claims 28-40, wherein the amplicon vector comprises an origin of replication (ori) and a packaging signal (pac).

42. The system of any one of claims 28-41, wherein the HSV amplicon particle comprises an HSV-1 or an HSV-2 amplicon particle.

43. The system of any one of claims 28-42, wherein the amplicon vector comprises a sequence with at least 50% sequence identity to SEQ ID NO: 1, SEQ ID NO: 11, SEQ ID NO: 12, SEQ ID NO: 13, or SEQ ID NO: 14.

44. The system of any one of claims 28-43, wherein the amplicon vector comprises a sequence comprising SEQ ID NO: 1, SEQ ID NO: 11, SEQ ID NO: 12, SEQ ID NO: 13, or SEQ ID NO: 14.

45. A method of producing a Herpes Simplex Virus (HSV) amplicon particle comprising transfecting the packaging cell line of any one of claims 1-44 with an amplicon vector.

46. The method of claim 45, further comprising isolating the HSV amplicon particle from the packaging cell line.

47. The method of claim 45 or 46, wherein the HSV amplicon particle comprises an HSV-1 or an HSV-2 amplicon particle.

48. The method of any one of claims 45-47, wherein the amplicon vector comprises an origin of replication (ori) and a packaging signal (pac).

49. The method of any one of claims 45-48, wherein the amplicon vector further comprises at least one cargo nucleic acid sequence.

50. The method of claim 49, wherein the at least one cargo nucleic acid sequence comprises a transgene.

51. The method of claim 50, wherein the transgene comprises CRISPR associated protein 9 (Cas9), Cas3, Cas12a, Dystrophin (DYS), amylo-alpha-1, 6-glucosidase, 4-alpha-glucanotransferase (AGL), otoferlin (OTOF), myosin VIIA (MYO7A), ATP binding cassette subfamily A member 4 (ABCA4), coagulation factor VIII (F8), centrosomal protein 290 (CEP290), cadherin related 23 (CDH23), or centrosome and basal body associated protein (ALMS1).

52. The method of claim 50, wherein the transgene comprises a gene encoding an agent for treating a cancer, muscular dystrophy, non-syndromic deafness, Stargardt Disease, Leber congenital amaurosis 10, Alstrom syndrome, a glycogen storage disease, Usher Syndrome 1D, Usher Syndrome 1B, a cardiovascular disease, a neurodegenerative disease, chronic pain, a lung disease, or hemophilia.

53. The method of any one of claims 49-52, wherein the at least one cargo nucleic acid sequence further comprises at least one regulatory element comprising an enhancer, a promoter, a terminator, or a combination thereof.

54. The method of any one of claims 45-53, wherein the amplicon vector comprises a sequence with at least 50% sequence identity to SEQ ID NO: 1, SEQ ID NO: 11, SEQ ID NO: 12, SEQ ID NO: 13, or SEQ ID NO: 14.

55. The method of any one of claims 45-54, wherein the amplicon vector comprises a sequence comprising SEQ ID NO: 1, SEQ ID NO: 11, SEQ ID NO: 12, SEQ ID NO: 13, or SEQ ID NO: 14.

56. A Herpes Simplex Virus (HSV) amplicon particle produced by the method of any one of claims 45-55.

57. The HSV particle of claim 56, further comprising HSV capsid, tegument, and envelope proteins.

58. A pharmaceutical composition comprising the HSV amplicon particle of claim 56 or 57, and a pharmaceutically acceptable carrier.

59. A cell comprising the HSV amplicon particle of claim 56 or 57.

60. A kit comprising the HSV amplicon particle of claim 56 or 57, or the packaging cell line of any one of claims 1-27 and an instruction manual for using the kit.

61. A kit for preparing an HSV amplicon particle comprising (i) the packaging cell line of any one of claims 1-27 and (ii) an amplicon vector comprising an origin of replication (ori) and a packaging signal (pac); and an instruction manual for using the kit.

62. The kit of claim of 61, wherein the amplicon vector further comprises at least one cargo sequence.

63. The kit of claim of 62, wherein the at least one cargo sequence comprises a transgene selected from the group consisting of CRISPR associated protein 9 (Cas9), Cas3, Cas12a, Dystrophin (DYS), amylo-alpha-1, 6-glucosidase, 4-alpha-glucanotransferase (AGL), otoferlin (OTOF), myosin VIIA (MYO7A), ATP binding cassette subfamily A member 4 (ABCA4), coagulation factor VIII (F8), centrosomal protein 290 (CEP290), cadherin related 23 (CDH23), or centrosome and basal body associated protein (ALMS1).

64. The kit of claim 62, wherein the at least one cargo sequence comprises a transgene encoding an agent for treating a cancer, muscular dystrophy, non-syndromic deafness, Stargardt Disease, Leber congenital amaurosis 10, Alstrom syndrome, a glycogen storage disease, Usher Syndrome 1D, Usher Syndrome 1B, a cardiovascular disease, a neurodegenerative disease, chronic pain, a lung disease, or hemophilia.

65. The kit of any one of claims of 62-64, wherein the at least one cargo nucleic acid sequence further comprises at least one regulatory element comprising an enhancer, a promoter, a terminator, or a combination thereof.

66. The kit of any one of claims 60-65, wherein the amplicon vector comprises a sequence with at least 50% sequence identity to SEQ ID NO: 1, SEQ ID NO: 11, SEQ ID NO: 12, SEQ ID NO: 13, or SEQ ID NO: 14.

67. The kit of any one of claims 60-66, wherein the amplicon vector comprises a sequence comprising SEQ ID NO: 1, SEQ ID NO: 11, SEQ ID NO: 12, SEQ ID NO: 13, or SEQ ID NO: 14.

68. A method of expressing a transgene in a cell, the method comprising contacting the cell with an HSV amplicon particle produced by the method of any one of claims 45-55, or the HSV amplicon particle of claim 56 or 57.

69. The method of claim 68, wherein the contacting occurs in vivo.

70. The method of claim 68 or 69, wherein the cell is a liver cell, a lung cell, an epithelial cell, a neural cell, a cardiac cell, a muscle cell, a stem cell, or a cancer cell.

71. The method of claim 68, wherein the contacting occurs in vitro.

72. The method of any one of claims 68-71, wherein the cell is a human cell.

73. A method of treating a disease or condition in a subject in need thereof, the method comprising administering to the subject therapeutically effective amount of a Herpes Simplex Virus (HSV) amplicon particle produced by the method of any one of claims 45-55, the HSV amplicon particle of claim 56 or 57, or the pharmaceutical composition of claim 58, wherein the therapeutically effective amount comprises an amount sufficient to infect cells of the subject such that at least one transgene is expressed in the subject.

74. The method of claim 73, wherein the disease or condition comprises a cancer, muscular dystrophy, non-syndromic deafness, Stargardt Disease, Leber congenital amaurosis 10, Alstrom syndrome, a glycogen storage disease, Usher Syndrome 1D, Usher Syndrome 1B, a cardiovascular disease, a neurodegenerative disease, chronic pain, a lung disease, or hemophilia.

75. The method of claim 73, wherein the disease or condition comprises a disease or condition caused by a genetic mutation.

76. The method of claim 74, wherein the disease or condition is a cancer.

77. The method of claim 76, wherein the at least one transgene encodes an agent that enhances tumor killing activity.

78. The method of any one of claims 73-77, wherein the subject is a human.

79. A use of the packaging cell line of any one of claims 1-27 or the system of any one of claims 28-44 for producing a Herpes Simplex Virus (HSV) amplicon particle.

80. The use of claim 79, wherein the producing comprises transfecting the packaging cell line with an amplicon vector.

81. The use of claim 79 or 80, wherein the producing further comprises isolating the HSV amplicon particle from the packaging cell line.

82. The use of any one of claims 79-81, wherein the HSV amplicon particle comprises an HSV-1 or an HSV-2 amplicon particle.

83. The use of any one of claims 80-82, wherein the amplicon vector comprises an origin of replication (ori) and a packaging signal (pac).

84. The use of any one of claims 80-83, wherein the amplicon vector further comprises at least one cargo nucleic acid sequence.

85. The use of claim 84, wherein the at least one cargo nucleic acid sequence comprises a transgene.

86. The use of claim 85, wherein the transgene comprises CRISPR associated protein 9 (Cas9), Cas3, Cas12a, Dystrophin (DYS), amylo-alpha-1, 6-glucosidase, 4-alpha-glucanotransferase (AGL), otoferlin (OTOF), myosin VIIA (MYO7A), ATP binding cassette subfamily A member 4 (ABCA4), coagulation factor VIII (F8), centrosomal protein 290 (CEP290), cadherin related 23 (CDH23), or centrosome and basal body associated protein (ALMS1).

87. The use of claim 85, wherein the transgene comprises a gene encoding an agent for treating a cancer, muscular dystrophy, non-syndromic deafness, Stargardt Disease, Leber congenital amaurosis 10, Alstrom syndrome, a glycogen storage disease, Usher Syndrome 1D, Usher Syndrome 1B, a cardiovascular disease, a neurodegenerative disease, chronic pain, a lung disease, or hemophilia.

88. The use of any one of claims 84-87, wherein the at least one cargo nucleic acid sequence further comprises at least one regulatory element comprising an enhancer, a promoter, a terminator, or a combination thereof.

89. The use of any one of claims 80-88, wherein the amplicon vector comprises a sequence with at least 50% sequence identity to SEQ ID NO: 1, SEQ ID NO: 11, SEQ ID NO: 12, SEQ ID NO: 13, or SEQ ID NO: 14.

90. The use of any one of claims 80-89, wherein the amplicon vector comprises a sequence comprising SEQ ID NO: 1, SEQ ID NO: 11, SEQ ID NO: 12, SEQ ID NO: 13, or SEQ ID NO: 14.

91. A use of a Herpes Simplex Virus (HSV) amplicon particle produced by the method of any one of claims 45-55, the HSV amplicon particle of claim 56 or 57, or the pharmaceutical composition of claim 58 for treating a disease or condition in a subject.

92. The use of claim 91, wherein the disease or condition comprises a cancer, muscular dystrophy, non-syndromic deafness, Stargardt Disease, Leber congenital amaurosis 10, Alstrom syndrome, a glycogen storage disease, Usher Syndrome 1D, Usher Syndrome 1B, a cardiovascular disease, a neurodegenerative disease, chronic pain, a lung disease, or hemophilia.

93. The use of claim 91, wherein the disease or condition comprises a disease or condition caused by a genetic mutation.

94. The use of claim 92, wherein the disease or condition is a cancer.

95. The use of any one of claims 91-94, wherein the subject is a human.

96. A composition comprising a recombinant genome, wherein the recombinant genome comprises:
a. a first nucleic acid sequence comprising one or more Herpes Simplex Virus (HSV) Class I genes; and
b. a second nucleic acid sequence comprising one or more HSV Class I and Class 11 genes.

97. The composition of claim 96, wherein the first nucleic acid sequence further comprises a first one or more regulatory elements.

98. The composition of claim 96 or 97, wherein the first nucleic acid sequence is in a first genomic safe harbor site of the recombinant genome.

99. The composition of claim 98, wherein the first genomic safe harbor site comprises a Rosa26 homolog locus.

100. The composition of any one of claims 96-99, wherein the one or more HSV Class I genes comprise Infected-Cell Polypeptide 4 (ICP4), ICP27, ICP0, ICP34.5, VP16, or a combination thereof.

101. The composition of any one of claims 97-100, wherein the first one or more regulatory elements comprise an enhancer, a promoter, a terminator, or a combination thereof.

102. The composition of claim 101, wherein the first one or more regulatory elements comprise the promoter.

103. The composition of claim 102, wherein the promoter comprises an inducible promoter.

104. The composition of claim 103, wherein the inducible promoter comprises a tetracycline-inducible promoter or a doxycycline-inducible promoter.

105. The composition of claim 103 or 104, wherein the inducible promoter comprises Tet-On promoter comprising TRE3G or TRE-tight.

106. The composition of any one of claims 96-105, wherein the second nucleic acid sequence is in a second genomic safe harbor site of the recombinant genome.

107. The composition of claim 106, wherein the second genomic safe harbor comprises an adeno-associated virus site 1 (AAVS1) locus.

108. The composition of any one of claims 96-107, wherein the one or more HSV Class II genes comprise UL1, UL2, UL3, UL4, UL5, UL6, UL7, UL8, UL9, UL10, UL 11, UL12, UL13, UL14, UL15, UL16, UL17, UL18, UL19, UL20, UL21, UL22, UL23, UL24, UL25, UL26, UL26.5, UL27, UL28, UL29, UL30, UL31, UL32, UL33, UL34, UL35, UL36, UL37, UL38, UL39, UL40, UL41, UL42, UL43, UL44, UL45, UL46, UL47, UL49, UL49A, UL50, UL51, UL52, UL53, UL55, UL56, US1, US2, US3, US4, US5, US6, US7, US8, US9, US10, US11, US12, or a combination thereof.

109. The composition of any one of claims 96-108, wherein the second nucleic acid sequence further comprises a second one or more regulatory elements.

110. The composition of claim 109, wherein the second one or more regulatory elements comprise an enhancer, a promoter, a terminator, or a combination thereof.

111. The composition of claim 110, wherein the second one or more regulatory elements comprise the promoter.

112. The composition of claim 111, wherein the promoter comprises a natural promoter for HSV Class II genes comprising UL1, UL2, UL3, UL4, UL5, UL6, UL7, UL8, UL9, UL10, UL11, UL12, UL13, UL14, UL15, UL16, UL17, UL18, UL19, UL20, UL21, UL22, UL23, UL24, UL25, UL26, UL26.5, UL27, UL28, UL29, UL30, UL31, UL32, UL33, UL34, UL35, UL36, UL37, UL38, UL39, UL40, UL41, UL42, UL43, UL44, UL45, UL46, UL47, UL49, UL49A, UL50, UL51, UL52, UL53, UL55, UL56, US1, US2, US3, US4, US5, US6, US7, US8, US9, US10, US11, US12, or a combination thereof.

113. The composition of any one of claims 96-112, wherein the recombinant genome does not comprise a nucleic acid sequence comprising an HSV origin of replication (ori), an HSV packaging signal (pac), or a combination thereof.

114. The composition of any one of claims 96-113, wherein the recombinant genome does not comprise a nucleic acid sequence comprising oriL/S.

115. The composition of any one of claims 96-114, wherein the first nucleic acid sequence comprises a sequence with at least 50% sequence identity to SEQ ID NO: 2, SEQ ID NO: 3, SEQ ID NO: 7, or SEQ ID NO: 8.

116. The composition of any one of claims 96-115, wherein the first nucleic acid sequence comprises a sequence comprising SEQ ID NO: 2, SEQ ID NO: 3, SEQ ID NO: 7, or SEQ ID NO: 8.

117. The composition of any one of claims 96-116, wherein the second nucleic acid sequence comprises a sequence with at least 50% sequence identity to SEQ ID NO: 5, SEQ ID NO: 6, SEQ ID NO: 9, SEQ ID NO: 10, or SEQ ID NO: 17.

118. The composition of any one of claims 96-117, wherein the second nucleic acid sequence comprises a sequence comprising SEQ ID NO: 5, SEQ ID NO: 6, SEQ ID NO: 9, SEQ ID NO: 10, or SEQ ID NO: 17.

119. A cell or a cell line comprising the composition of any one of claims 96-118.

120. The cell or the cell line of claim 119, wherein the cell or the cell line comprises a mammalian cell or a mammalian cell line.

121. The cell or the cell line of claim 120, wherein the cell or the cell line comprises a Human Bone Osteosarcoma Epithelial (U2OS) cell, a Baby Hamster Kidney (BHK) cell, a Human Embryonic Kidney (HEK 293) cell, or an African Green Monkey Kidney (Vero) cell.

122. The cell or the cell line of claim 121, wherein the U2OS cell comprises an U2OS cell comprising ICP4 and ICP27 genes (U2OS-4/27).

123. The cell or the cell line of claim 121, wherein the U2OS cell comprises an U2OS cell comprising ICP0, ICP4, and ICP27 genes (U2OS-0-4/27).

124. A kit comprising the composition of any one of claims 96-118, or the cell or the cell line of any one of claims 119-123 and an instruction manual for using the kit.

125. A use of the composition of any one of claims 96-118 for producing a packaging cell line.

126. A method of producing a packaging cell line comprising introducing the composition of any one of claims 96-118 into a cell.

127. A method of producing a packaging cell line comprising introducing into a cell comprising a genome:
a. a first nucleic acid sequence comprising one or more Herpes Simplex Virus (HSV) Class I genes; and
b. a second nucleic acid sequence comprising one or more HSV Class I and Class II genes.

128. The method of claim 126 or 127, wherein the cell comprises a mammalian cell.

129. The method of any one of claims 126-128, wherein the mammalian cell comprises a Human Bone Osteosarcoma Epithelial (U2OS) cell, a Baby Hamster Kidney (BHK) cell, a Human Embryonic Kidney (HEK 293) cell, or an African Green Monkey Kidney (Vero) cell.

130. The method of claim 129, wherein the U2OS cell comprises an U2OS cell comprising ICP4 and ICP27 genes (U2OS-4/27).

131. The method of claim 129, wherein the U2OS cell comprises an U2OS cell comprising ICP0, ICP4, and ICP27 genes (U2OS-0-4/27).

132. The method of any one of claims 126-131, wherein the first nucleic acid sequence is introduced into a first genomic safe harbor site of the genome.

133. The method of claim 132, wherein the first genomic safe harbor site comprises a Rosa26 homolog locus.

134. The method of any one of claims 126-133, wherein the second nucleic acid sequence is introduced into a second genomic safe harbor site of the genome.

135. The method of claim 134, wherein the second genomic safe harbor comprises an adeno-associated virus site 1 (AAVS1) locus.

136. The method of any one of claims 126-135, wherein the introducing comprises (i) a recombination mediated cassette exchange; (ii) a homology directed repair; or (iii) a random integration.

137. The method of claim 136, wherein (ii) the homology directed repair comprises (a) a homology directed repair following a targeted double strand break generated by an endonuclease or (b) a homology directed repair with long homology arms and naturally occurring double strand breaks.

138. The method of claim 137, wherein the endonuclease comprises a Clustered regularly interspaced short palindromic repeats (CRISPR)-CRISPR-associated protein 9 (Cas9), a zinc finger nuclease, or a transcription activator-like effector nuclease (TALEN).

139. The method of claim 137, wherein (b) the homology directed repair with long homology arms and naturally occurring double strand breaks further comprises selection with a marker.

140. The method of claim 136, wherein (iii) the random integration further comprises a selection with a marker.

141. The method of claim 139 or 140, wherein the marker comprises LacZ, CAT, HPRT1, PIGA, Luciferase, GFP, YFP, RFP, iRFP, EGFP, blasticidin, neomycin/G418, hygromycin, puromycin, or zeocin.

142. The method of any one of claims 127-141, wherein the first nucleic acid sequence further comprises a first one or more regulatory elements.

143. The method of any one of claims 127-142, wherein the one or more HSV Class I genes comprise Infected-Cell Polypeptide 4 (ICP4), ICP27, ICP0, ICP34.5, VP16, or a combination thereof.

144. The method of any one of claims 127-143, wherein the first one or more regulatory elements comprise an enhancer, a promoter, a terminator, or a combination thereof.

145. The method of claim 144, wherein the first one or more regulatory elements comprise the promoter.

146. The method of claim 145, wherein the promoter comprises an inducible promoter.

147. The method of claim 146, wherein the inducible promoter comprises a tetracycline-inducible promoter or a doxycycline-inducible promoter.

148. The method of claim 146 or 147, wherein the inducible promoter comprises Tet-On promoter comprising TRE3G or TRE-tight.

149. The method of any one of claims 127-148, wherein the one or more HSV Class II genes comprise UL 1, UL2, UL3, UL4, UL5, UL6, UL7, UL8, UL9, UL10, UL 11, UL 12, UL13, UL14, UL15, UL16, UL17, UL18, UL19, UL20, UL21, UL22, UL23, UL24, UL25, UL26, UL26.5, UL27, UL28, UL29, UL30, UL31, UL32, UL33, UL34, UL35, UL36, UL37, UL38, UL39, UL40, UL41, UL42, UL43, UL44, UL45, UL46, UL47, UL49, UL49A, UL50, UL51, UL52, UL53, UL55, UL56, US1, US2, US3, US4, US5, US6, US7, US8, US9, US10, US11, US12, or a combination thereof.

150. The method of any one of claims 127-149, wherein the second nucleic acid sequence further comprises a second one or more regulatory elements.

151. The method of claim 150, wherein the second one or more regulatory elements comprise an enhancer, a promoter, a terminator, or a combination thereof.

152. The method of claim 151, wherein the second one or more regulatory elements comprise the promoter.

153. The method of claim 152, wherein the promoter comprises a natural promoter for HSV Class II genes comprising UL1, UL2, UL3, UL4, UL5, UL6, UL7, UL8, UL9, UL10, UL11, UL12, UL13, UL14, UL15, UL16, UL17, UL18, UL19, UL20, UL21, UL22, UL23, UL24, UL25, UL26, UL26.5, UL27, UL28, UL29, UL30, UL31, UL32, UL33, UL34, UL35, UL36, UL37, UL38, UL39, UL40, UL41, UL42, UL43, UL44, UL45, UL46, UL47, UL49, UL49A, UL50, UL51, UL52, UL53, UL55, UL56, US1, US2, US3, US4, US5, US6, US7, US8, US9, US10, US11, US12, or a combination thereof.

154. The method of any one of claims 127-153, wherein the genome does not comprise a nucleic acid sequence comprising an HSV origin of replication (ori), an HSV packaging signal (pac), or a combination thereof.

155. The method of any one of claims 127-154, wherein the genome does not comprise a nucleic acid sequence comprising oriL/S.

156. The method of any one of claims 126-155, wherein the first nucleic acid sequence and/or the second nucleic acid sequence is comprised in a vector.

157. The method of claim 156, wherein the vector is selected from the group consisting of a DNA, an RNA, a plasmid, a lentivirus vector, adenoviral vector, a Rous sarcoma viral (RSV) vector, and a retrovirus vector.

The application's sequence listing, which the Patent Office published only in electronic form, follows.

SEQUENCE LISTING (17 sequences)

SEQ ID NO: 1 - DNA, 52982 bp, synthetic construct
  source 1..52982: mol_type = other DNA
gcttaactatgcggcatcagagcagattgtactgagagtgcaccataccaccttttcaattcatcattttttttttattcttttttttgatttcggtttccttgaaatttttttgattcggtaatctccgaacagaaggaagaacgaaggaaggagcacagacttagattggtatatatacgcatatgtagtgttgaagaaacatgaaattgcccagtattcttaacccaactgcacagaacaaaaacctgcaggaaacgaagataaatcatgtcgaaagctacatataaggaacgtgctgctactcatcctagtcctgttgctgccaagctatttaatatcatgcacgaaaagcaaacaaacttgtgtgcttcattggatgttcgtaccaccaaggaattactggagttagttgaagcattaggtcccaaaatttgtttactaaaaacacatgtggatatcttgactgatttttccatggagggcacagttaagccgctaaaggcattatccgccaagtacaattttttactcttcgaagacagaaaatttgctgacattggtaatacagtcaaattgcagtactctgcgggtgtatacagaatagcagaatgggcagacattacgaatgcacacggtgtggtgggcccaggtattgttagcggtttgaagcaggcggcagaagaagtaacaaaggaacctagaggccttttgatgttagcagaattgtcatgcaagggctccctatctactggagaatatactaagggtactgttgacattgcgaagagcgacaaagattttgttatcggctttattgctcaaagagacatgggtggaagagatgaaggttacgattggttgattatgacacccggtgtgggtttagatgacaagggagatgcattgggtcaacagtatagaaccgtggatgatgtggtgtctacaggatctgacattattattgttggaagaggactatttgcaaagggaagggatgctaaggtagagggtgaacgttacagaaaagcaggctgggaagcatatttgagaagatgcggccagcaaaactaaaaaactgtattataagtaaatgcatgtatactaaactcacaaattagagcttcaatttaattatatcagttattaccctatgcggtgtgaaataccgcacaatgcgtaaggaggcggccgcccaactacgcagccgatcaacaacagaaacgcgacggtcgagatgaggaacgcacactggagcctttatcagatggtgttgatttcaattactccggagcgtgatgcggatcaaagtaaccgcgatggaaggtgggggactcgaaatagatccgttcttagccctgcgaaacatctactgtacaccacatgcaacagccacaattctcatgtttgacagcttatcatcgaatttctgccattcatccgcttattatcacttattcaggcgtagcaaccaggcgtttaagggcaccaataactgccttaaaaaaattagaaaaactcatcgagcatcaaatgaaactgcaatttattcatatcaggattatcaataccatatttttgaaaaagccgtttctgtaatgaaggagaaaactcaccgaggcagttccataggatggcaagatcctggtatcggtctgcgattccgactcgtccaacatcaatacaacctattaatttcccctcgtcaaaaataaggttatcaagtgagaaatcaccatgagtgacgactgaatccggtgagaatggcaaaagtttatgcatttctttccagacttgttcaacaggccagccattacgctcgtcatcaaaatcactcgcatcaaccaaaccgttattcattcgtgattgcgcctgagccagacgaaatacgcgatcgctgttaaaaggacaattacaaacaggaatcgaatgcaaccggcgcaggaacactgccagcgcatcaacaatattttcacctgaatcaggatattcttctaatacctggaatgctgtttttccggggatcgcagtggtgagtaaccatgcatcatcaggagtacggataaaatgcttgatggtcggaagaggcataaattccgtcagccagtttagtctgaccatctcatctgtaacatcattggcaacgctacctttgccatgtttcagaaacaactctggcgcatcgggcttcccatacaatcgatagattgtcgcacctgattgcccgacattatcgcgagcccatttatacccatataaatcagcatccatgttggaatttaatcgcggcctcgagcaagacgtttcccgttgaatatggctcattttagcttccttagctcctgaaaatctcgataactcaaaaaatacgtccggtagtgatcttatttcattatggtgaaagttggaacctcttacgtgccgatcaacgtccctgggtccttttcatcacgtgctataaaaataattataatttaaattttttaatataaatatataaattaaaaatagaaagtaaaaaaagaaattaaagaaaaaatagtttttgttttccgaagatgtaaaagactctagggggatcgccaacaaatactaccttttatcttgctcttcctgctctcaggtattaatgccgaattgtttcatcttgtctgtgtagaagaccacacacgaaaatcctgtgattttacattttacttatcgttaatcgaatgtatatctatttaatctgcttttcttgtctaataaatatatatgtaaagtacgctttttgttgaaattttttaaacctttgtttatttttttttcttcattccgtaactcttctaccttctttatttactttctaaaatccaaatacaaaacataaaaataaataaacacagagtaaattcccaaattattccatcattaaaagatacgaggcgcgtgtaagttacaggcaagcgatcttttcgccaaaagttggcccagggcttcccggtatcaacagggacaccaggatttatttattctgcgaagtgatcttccgtcacaggtatttattcgcgataagctcatggagcggcgtaaccgtcgcacaggaaggacagagaaagcgcggatctgggaagtgacggacagaacggtcaggacctggattggggaggcggttgccgccgctgctgctgacggtgtgacgttctctgttccggtcacaccacatacgttccgccattcctatgcgatgcacatgctgtatgccggtataccgctgaaagttctgcaaagcctgatgggacataagtccatcagttcaacggaagtctacacgaaggtttttgcgctggatgtggctgcccggcaccgggtgcagtttgcgatgccggagtctgatgcggttgcgatgctgaaacaattatcctgagaataaatgccttggcctttatatggaaatgtggaactgagtggatatgctgtttttgtctgttaaacagagaagctggctgttatccactgagaagcgagcgaaacagtcgggaaaatctcccattatcgtagagatccgcattattaatctcaggagcctgtgtagcgtttataggaagtagtgttctgtcatgatgcctgcaagcggtaacgaaaacgatttgaatatgccttcaggaacaatagaaatcttcgtgcggtgttacgttgaagtggagcggattatgtcagcaatggacagaacaacctaatgaacacagaaccatgatgtggtctgtccttttacagccagtagtgctcgccgcagtcgagcgacagggcgaagccctcgagctggttgccctcgccgctgggctggcggctgtctatggccctgcaaacgcgccagaaacgccgtcgaagccgtgtgcgagacaccgcggccggccgccggcgttgtggatacctcgcggaaaacttggccctcactgacagatgaggggcggacgttgacacttgaggggccgactcacccggcgcggcgttgacagatgaggggcaggctcgatttcggccggcgacgtggagctggacagcctcgcaaatcggcgaaaacgcctgattttacgcgagtttcccacagatgatgtggacaagcctggggataagtgccctgcggtattgacacttgaggggcgcgactactgacagatgaggggcgcgatccttgacacttgaggggcagagtgctgacagatgaggggcgcacctattgacatttgaggggctgtccacaggcagaaaatccagcatttgcaagggtttccgcccgtttttcggccaccgctaacctgtcttttaacctgcttttaaaccaatatttataaaccttgtttttaaccagggctgcgccctgtgcgcgtgaccgcgcacgccgaaggggggtgcccccccttctcgaaccctcccggtcgagtgagcgaggaagcaccagggaacagcacttatatattctgcttacacacgatgcctgaaaaaacttcccttggggttatccacttatccacggggatatttttataattattttttttatagtttttagatcttcttttttagagcgccttgtaggcctttatccatgctggttctagagaaggtgttgtgacaaattgccctttcagtgtgacaaatcaccctcaaatgacagtcctgtctgtgacaaattgcccttaaccctgtgacaaattgccctcagaagaagctgttttttcacaaagttatccctgcttattgactcttttttatttagtgtgacaatctaaaaacttgtcacacttcacatggatctgtcatggcggaaacagcggttatcaatcacaagaaacgtaaaaatagcccgcgaatcgtccagtcaaacgacctcactgaggcggcatatagtctctcccgggatcaaaaacgtatgctgtatctgttcgttgaccagatcagaaaatctgatggcaccctacaggaacatgacggtatctgcgagatccatgttgctaaatatgctgaaatattcggattgacctctgcggaagccagtaaggatatacggcaggcattgaagagtttcgcggggaaggaagtggttttttatcgccctgaagaggatgccggcgatgaaaaaggctatgaatcttttccttggtttatcaaacgtgcgcacagtccatccagagggctttacagtgtacatatcaacccatatctcattcccttctttatcgggttacagaaccggtttacgcagtttcggcttagtgaaacaaaagaaatcaccaatccgtatgccatgcgtttatacgaatccctgtgtcagtatcgtaagccggatggctcaggcattgtctctctgaaaatcgactggatcatagagcgttaccagctgcctcaaagttaccagcgtatgcctgacttccgccgccgcttcctgcaggtctgtgttaatgagatcaacagcagaactccaatgcgcctctcatacattgagaaaaagaaaggccgccagacgactcatatcgtattttccttccgcgatatcacttccatgacgacaggatagtctgagggttatctgtcacagatttgagggtggttcgtcacatttgttctgacctactgagggtaatttgtcacagttttgctgtttccttcagcctgcatggattttctcatactttttgaactgtaatttttaaggaagccaaatttgagggcagtttgtcacagttgatttccttctctttcccttcgtcatgtgacctgatatcgggggttagttcgtcatcattgatgagggttgattatcacagtttattactctgaattggctatccgcgtgtgtacctctacctggagtttttcccacggtggatatttcttcttgcgctgagcgtaagagctatctgacagaacagttcttctttgcttcctcgccagttcgctcgctatgctcggttacacggctgcggcgagcgctagtgataataagtgactgaggtatgtgctcttcttatctccttttgtagtgttgctcttattttaaacaactttgcggttttttgatgactttgcgattttgttgttgctttgcagtaaattgcaagatttaataaaaaaacgcaaagcaatgattaaaggatgttcagaatgaaactcatggaaacacttaaccagtgcataaacgctggtcatgaaatgacgaaggctatcgccattgcacagtttaatgatgacagcccggaagcgaggaaaataacccggcgctggagaataggtgaagcagcggatttagttggggtttcttctcaggctatcagagatgccgagaaagcagggcgactaccgcacccggatatggaaattcgaggacgggttgagcaacgtgttggttatacaattgaacaaattaatcatatgcgtgatgtgtttggtacgcgattgcgacgtgctgaagacgtatttccaccggtgatcggggttgctgcccataaaggtggcgtttacaaaacctcagtttctgttcatcttgctcaggatctggctctgaaggggctacgtgttttgctcgtggaaggtaacgacccccagggaacagcctcaatgtatcacggatgggtaccagatcttcatattcatgcagaagacactctcctgcctttctatcttggggaaaaggacgatgtcacttatgcaataaagcccacttgctggccggggcttgacattattccttcctgtctggctctgcaccgtattgaaactgagttaatgggcaaatttgatgaaggtaaactgcccaccgatccacacctgatgctccgactggccattgaaactgttgctcatgactatgatgtcatagttattgacagcgcgcctaacctgggtatcggcacgattaatgtcgtatgtgctgctgatgtgctgattgttcccacgcctgctgagttgtttgactacacctccgcactgcagtttttcgatatgcttcgtgatctgctcaagaacgttgatcttaaagggttcgagcctgatgtacgtattttgcttaccaaatacagcaatagcaatggctctcagtccccgtggatggaggagcaaattcgggatgcctggggaagcatggttctaaaaaatgttgtacgtgaaacggatgaagttggtaaaggtcagatccggatgagaactgtttttgaacaggccattgatcaacgctcttcaactggtgcctggagaaatgctctttctatttgggaacctgtctgcaatgaaattttcgatcgtctgattaaaccacgctgggagattagataatgaagcgtgcgcctgttattccaaaacatacgctcaatactcaaccggttgaagatacttcgttatcgacaccagctgccccgatggtggattcgttaattgcgcgcgtaggagtaatggctcgcggtaatgccattactttgcctgtatgtggtcgggatgtgaagtttactcttgaagtgctccggggtgatagtgttgagaagacctctcgggtatggtcaggtaatgaacgtgaccaggagctgcttactgaggacgcactggatgatctcatcccttcttttctactgactggtcaacagacaccggcgttcggtcgaagagtatctggtgtcatagaaattgccgatgggagtcgccgtcgtaaagctgctgcacttaccgaaagtgattatcgtgttctggttggcgagctggatgatgagcagatggctgcattatccagattgggtaacgattatcgcccaacaagtgcttatgaacgtggtcagcgttatgcaagccgattgcagaatgaatttgctggaaatatttctgcgctggctgatgcggaaaatatttcacgtaagattattacccgctgtatcaacaccgccaaattgcctaaatcagttgttgctcttttttctcaccccggtgaactatctgcccggtcaggtgatgcacttcaaaaagcctttacagataaagaggaattacttaagcagcaggcatctaaccttcatgagcagaaaaaagctggggtgatatttgaagctgaagaagttatcactcttttaacttctgtgcttaaaacgtcatctgcatcaagaactagtttaagctcacgacatcagtttgctcctggagcgacagtattgtataagggcgataaaatggtgcttaacctggacaggtcccgtgttccaactgagtgtatagagaaaattgaggccattcttaaggaacttgaaaagccagcaccctgatgcgacctcgttttagtctacgtttatctgtctttacttaatgtcctttgttacaggccagaaagcataactggcctgaatattctctctgggcccactgttccacttgtatcgtcggtctgataatcagactgggaccacggtcccactcgtatcgtcggtctgattattagtctgggaccacggtcccactcgtatcgtcggtctgattattagtctgggaccacggtcccactcgtatcgtcggtctgataatcagactgggaccacggtcccactcgtatcgtcggtctgattattagtctgggaccatggtcccactcgtatcgtcggtctgattattagtctgggaccacggtcccactcgtatcgtcggtctgattattagtctggaaccacggtcccactcgtatcgtcggtctgattattagtctgggaccacggtcccactcgtatcgtcggtctgattattagtctgggaccacgatcccactcgtgttgtcggtctgattatcggtctgggaccacggtcccacttgtattgtcgatcagactatcagcgtgagactacgattccatcaatgcctgtcaagggcaagtattgacatgtcgtcgtaacctgtagaacggagtaacctcggtgtgcggttgtatgcctgcggtggattgctgctgtgtcctgcttatccacaacattttgcgcacggttatgtggacgggccgaaaccagtacaaaggcaacatcctcacttgggtgaacggaaacgcagtattatggttactttttggatacgtgaaacatatcccatggtagtccttagacttgggagtctatcacccctagggcccatatctggaaatagacgccaggttgaatccgtatttggaggtacgatggaacagtctgggtgggacgtgcttcaataaaatatctttattttcattacatctgtgtgttggttttttgtgtgaatcgatagtactaacatacgctctccatcaaaacaaaacgaaacaaaacaaactagcaaaataggctgtccccagtgcaagtgcaggtgccagaacatttctctggcctaactggcctcaatattggccattagccatattattcattggttatatagcataaatcaatattggctattggccattgcatacgttgtatctatatcataatatgtacatttatattggctcatgtccaatatgaccgccatgttggcattgattattgactagttattaatagtaatcaattacggggtcattagttcatagcccatatatggagttccgcgttacataacttacggtaaatggcccgcctggctgaccgcccaacgacccccgcccattgacgtcaataatgacgtatgttcccatagtaacgccaatagggactttccattgacgtcaatgggtggagtatttacggtaaactgcccacttggcagtacatcaagtgtatcatatgccaagtccgccccctattgacgtcaatgacggtaaatggcccgcctggcattatgcccagtacatgaccttacgggactttcctacttggcagtacatctacgtattagtcatcgctattaccatggtgatgcggttttggcagtacaccaatgggcgtggatagcggtttgactcacggggatttccaagtctccaccccattgacgtcaatgggagtttgttttggcaccaaaatcaacgggactttccaaaatgtcgtaataaccccgccccgttgacgcaaatgggcggtaggcgtgtacggtgggaggtctatataagcagagctcgtttagtgaaccgtcagatcactagaagctttattgcggtagtttatcacagttaaattgctaacgcagtcagtgggcctcggcggccaagcttggcaatccggtactgttggtaaagccgaattcgtcagtgggcctcgatatcaccatggacctcttggtcgacgagctgtttgccgacatgaacgcggacggcgcttcgccaccgcccccccgcccggccgggggtcccaaaaacaccccggcggcccccccgctgtacgcaacggggcgcctgagccaggcccagctcatgccctccccacccatgcccgtcccccccgccgccctctttaaccgtctcctcgacgacttgggctttagcgcgggccccgcgctatgtaccatgctcgatacctggaacgaggatctgttttcggcgctaccgaccaacgccgacctgtaccgggagtgtaaattcctatcaacgctgcccagcgatgtggtggaatggggggacgcgtacgtccccgaacgcacccaaatcgacattcgcgcccacggcgacgtggccttccctacgcttccggccacccgcgacggcctcgggctctactacgaagcgctctctcgtttcttccacgccgagctacgggcgcgggaggagagctatcgaaccgtgttggccaacttctgctcggccctgtaccggtacctgcgcgccagcgtccggcagctgcaccgccaggcgcacatgcgcggacgcgatcgcgacctgggagaaatgctgcgcgccacgatcgcggacaggtactaccgagagaccgctcgtctggcgcgtgttttgtttttgcatttgtatctatttttgacccgcgagatcctatgggccgcgtacgccgagcagatgatgcggcccgacctgtttgactgcctctgttgcgacctggagagctggcgtcagttggcgggtctgttccagcccttcatgttcgtcaacggagcgctcaccgtccggggagtgccaatcgaggcccgccggctgcgggagctaaaccacattcgcgagcaccttaacctcccgctggtgcgcagcgcggctacggaggagccaggggcgccgttgacgacccctcccaccctgcatggcaaccaggcccgcgcctctgggtactttatggtgttgattcgggcgaagttggactcgtattccagcttcacgacctcgccctccgaggcggtcatgcgggaacacgcgtacagccgcgcgcgtacgaaaaacaattacgggtctaccatcgagggcctgctcgatctcccggacgacgacgcccccgaagaggcggggctggcggctccgcgcctgtcctttctccccgcgggacacacgcgcagactgtcgacggcccccccgaccgatgtcagcctgggggacgagctccacttagacggcgaggacgtggcgatggcgcatgccgacgcgctagacgatttcgatctggacatgttgggggacggggattccccgggtccgggatttaccccccacgactccgccccctacggcgctctggatatggccgacttcgagtttgagcagatgtttaccgatgcccttggaattgacgagtacggtgggtaattctagagtcggggcggccggccgcttcgagcagacatgataagatacattgatgagtttggacaaaccacaactagaatgcagtgaaaaaaatgctttatttgtgaaatttgtgatgctattgctttatttgtaaccattataagctgcaataaacaagttaacaacaacaattgcattcattttatgtttcaggttcagggggaggtgtgggaggttttttaaagcaagtaaaacctctacaaatgtggtagggcgggtctttcccccccgcgtccgcgtgtccctttccgatgcgatcccgatcccgagccggggcgtcgcgatgccgacgccgtccgctccgacggccctctgcgactcccgctcccggtccgcgtgctccgcagccgctcccgtcgttcgtggccggcgccgtctgcgggcgtcggtcgcgccgggcctttatgtgcgccggagagacccgccccccgccgcccgggtccgcccccggggccggcgcggagtcgggcacggcgccagtgctcgcacttcgccctaataatatatatatattgggacgaagtgcgaacgcttcgcgttctcacttcttttacccggcggccccgcccccttggggcggtcccgcccgccggccaatgggggggcggcaaggcgggcggtggcggccgctctagaagatctggcctccgcgccgggttttggcgcctcccgcgggcgcccccctcctcacggcgagcgctgccacgtcagacgaagggcgcagcgagcgtcctgatccttccgcccggacgctcaggacagcggcccgctgctcataagactcggccttagaaccccagtatcagcagaaggacattttaggacgggacttgggtgactctagggcactggttttctttccagagagcggaacaggcgaggaaaagtagtcccttctcggcgattctgcggagggatctccgtggggcggtgaacgccgatgattatataaggacgcgccgggtgtggcacagctagttccgtcgcagccgggatttgggtcgcggttcttgtttgtggatcgctgtgatcgtcacttggtgagtagcgggctgctgggctggccggggctttcgtggccgccgggccgctcggtgggacggaagcgtgtggagagaccgccaagggctgtagtctgggtccgcgagcaaggttgccctgaactgggggttggggggagcgcagcaaaatggcggctgttcccgagtcttgaatggaagacgcttgtgaggcgggctgtgaggtcgttgaaacaaggtggggggcatggtgggcggcaagaacccaaggtcttgaggccttcgctaatgcgggaaagctcttattcgggtgagatgggctggggcaccatctggggaccctgacgtgaagtttgtcactgactggagaactcggtttgtcgtctgttgcgggggcggcagttatggcggtgccgttgggcagtgcacccgtacctttgggagcgcgcgccctcgtcgtgtcgtgacgtcacccgttctgttggcttataatgcagggtggggccacctgccggtaggtgtgcggtaggcttttctccgtcgcaggacgcagggttcgggcctagggtaggctctcctgaatcgacaggcgccggacctctggtgaggggagggataagtgaggcgtcagtttctttggtcggttttatgtacctatcttcttaagtagctgaagctccggttttgaactatgcgctcggggttggcgagtgtgttttgtgaagttttttaggcaccttttgaaatgtaatcatttgggtcaatatgtaattttcagtgttagactagtaaattgtccgctaaattctggccgtttttggcttttttgttagacgaagcttgatccaccggatccccgcggatggtgagcaagggcgaggaggataacatggccatcatcaaggagttcatgcgcttcaaggtgcacatggagggctccgtgaacggccacgagttcgagatcgagggcgagggcgagggccgcccctacgagggcacccagaccgccaagctgaaggtgaccaagggtggccccctgcccttcgcctgggacatcctgtcccctcagttcatgtacggctccaaggcctacgtgaagcaccccgccgacatccccgactacttgaagctgtccttccccgagggcttcaagtgggagcgcgtgatgaacttcgaggacggcggcgtggtgaccgtgacccaggactcctccctgcaggacggcgagttcatctacaaggtgaagctgcgcggcaccaacttcccctccgacggccccgtaatgcagaagaagaccatgggctgggaggcctcctccgagcggatgtaccccgaggacggcgccctgaagggcgagatcaagcagaggctgaagctgaaggacggcggccactacgacgctgaggtcaagaccacctacaaggccaagaagcccgtgcagctgcccggcgcctacaacgtcaacatcaagttggacatcacctcccacaacgaggactacaccatcgtggaacagtacgaacgcgccgagggccgccactccaccggcggcatggacgagctgtacaaggacccatgatagagatctatcgatcctgaattcgatcagacatgataagatacattgatgagtttggacaaaccacaactagaatgcagtgaaaaaaatgctttatttgtgaaatttgtgatgctattgctttatttgtaaccattataagctgcaataaacaagttaacaacaacaattgcattcattttatgtttcaggttcagggggaggtgtgggaggttttttatcgataccgtcgacctcgagggggggcccggtacccagcgtgcgccgtgctctgttggtttcacctgtggcagcccgggccccccgcgggcgcgcgcgcgcgcaaaaaaggcgggcggcggtccgggcggcgtgcgcgcgcgcggcgggcgttgggggcggggccgcgggagcgggggaggagcgggggaggagcgggggaggagcgggggaggagcggggggaggagcggggggaggaacggggggaggagcggggggaggagcgggggaggagcggagcgggggaggagcgggggaggagcgggggaggagcgggggaggagcggggggaggagcggggggaggaacggggggaggagcggggggaggagcgggggaggagcagccagaccccggaaacgggccccccccaaaacacaccccccgggggtcgcgcgcggccctttaaaggcgggcggcgggcagcccgggccccccgcggccgagactagcgagttagacaggcaagcactactcgcctctgcacgcacatgcttgcctgtcaaactctaccaccccggcacgctctctgtctccatggcccgccgccgccatcgcggcccccgccgcccccggccgcccgggcccacgggcgcggtcccaaccgcacagtcccaggtaacctccacgcccaactcggaacccgtggtcaggagcgcgcccgcggccgccccgccgccgccccccgccagtgggcccccgccttcttgttcgctgctgctgcgccagtggctccacgttcccgagtccgcgtccgacgacgacgacgacgactggccggacagccccccgcccgagccggcgccagaggcccggcccaccgccgccgccccccgcccccggtccccaccgcccggcgcgggcccggggggcggggctaacccctcccaccccccctcacgccccttccgccttccgccgcgcctcgccctccgcctgcgcgtcaccgcagagcacctggcgcgcctgcgcctgcgacgcgcgggcggggagggggcgccgaagccccccgcgacccccgcgacccccgcgacccccacgcgggtgcgcttctcgccccacgtccgggtgcgccacctggtggtctgggcctcggccgcccgcctggcgcgccgcggctcgtgggcccgcgagcgggccgaccgggctcggttccggcgccgggtggcggaggccgaggcggtcatcgggccgtgcctggggcccgaggcccgtgcccgggccctggcccgcggagccggcccggcgaactcggtctaacgttacacccgaggcggcctgggtcttccgcggagctcccgggagctccgcaccaagccgctctccggagagacgatggcaggagccgcgcatatatacgcttggagccggcccgcccccgaggcgggcccgccctcggagggcgggactggccaatcggcggccgccagcgcggcggggcccggccaaccagcgtccgccgagtcttcggggcccggcccactgggcggtaactcccgcccagtgggccgggccgcccacttcccggtatggtaattaaaaacttgcagaggcagatccccctgcttcatccccgtggcccgttgctcgcgtttgctggcggtgtccccggaagaaatatatttgcatgtctttagttctatgatgacacaaaccccgcccagcgtcttgtcattggcgaattcgaacacgcagatgcagtcggggcggcgcggtcccaggtccacttcgcatattaaggtgacgcgtgtggcctcgaacaccgagcgaccctgcagcgacccgcttaacagcgtcaacagcgtgccgcagatctcgagctcaagcttcgaattctgcagtcgacggtaccgcgggccccgatatccaattgcgggcgctgggtggtctctggccgcgcccactacaccagccaatccgtgtcggggaggtggaaagtgaaagacacgggcaccacacaccagcgggtcttttgtgttggccctaataaaaaaaactcaggggatttttgctgtctgttgggaaataaaggtttacttttgtatcttttccctgtctgtgttggatgtatcgcgggggtgcgtgggagtgggggtgcgtgggagtgggggtgcgtgggagtgggggtgcgtgggagtgggggtgcgtgggagtgggggtgcgtgggagtgggggtgcgtgggagtgggggtgcgtgggagtgggggtgcgtgggagtgggggtgcgtgggagtggggggtgcgtgggtgggggggtgcgtgggtgtgggggtgcgtgggagtgggggtgcgtgggagtgggggtgcgtgggagtgggggtgccatgttgggcaggctctggtgttaaccacagagccgcggcccgggctgcctgaccaccgatccccgaaagcatcctgccactggcatggagccagaaccacagtgggttgggtgtgggtgttaagtttccgcgagcgcctgcccgcccggactgacctggcctctggccgccacaaagggcgggggggggggttaactacactatagggcaacaaaggatgggaggggtagcggggcgggacggggcgcccaaaagggggtcggccacaccacagacgtgggtgttggggggtggggcggaggggtggggggggagacagaaacaggaacatagttagaaaacaagaatgcggtgcagccagagaatcacaggagacgaggggatgggcgtgttggttaccaacccacacccaggcatgctcggtggtatgaaggagggggggcggtgtttcttagagaccgccgggggacgtggggttggtgtgcaaaggcacgcgcacccgcgccggccaggtgggccggtaccccatccccccctcccccgacccttcccacccccgcgtgccagagatcaccccggtcccccggcacccgccactcctccatatcctcgctttaggaacaactttaggggggggtacacacgcgccgtgcatttccttccacacccccccccctcccccgcactcccccccccccaggcagtaagacccaaacatagagagccaggcacaaaaacacaggcggggtgggacacatgccttcttggagtacgtgggtcattggcgtggggggttacagcgacaccggccgaccccctggcggtcttccagccggcccttagataagggggcagttggtggtcggacgggtaagtaacagagtctaactaagggtgggagggggggaaaataacgggctggtgtgctgtaacacgagcccacccgcgagtggcgtggccgaccttagcctctggggcgccccctgtcgtttgggtccccccccctctattggggagaagcaggtgtctaacctacctggaaacgcggcgtctttgttgaacgacaccggggcgccctcgacgagtgggataacgggggaggaagggagggaggagggtactgggggtgaagggggggggaagaagcgagaacaggaaaggcgacggagcccggcagaacaccgagaaaaacgcagcgcatgcgccgggccgttgtggggccccgggccggggccccttgggtccgccggggccccgggccgggccgccacgggggccggccgttggcggtaaccccgagtgttcatctcaggccccgggccgggaacccggaaaagcctccggggggcctttttcgcgtcgcgtgccggcgagcgggtccggacggggcccggaccgccgcggtcgggggcccctcgtcccgggccgtacgcggccttcgccccgtgaggggacagacgaacgaaacattccggcgacggaacgaaaaacaccccagacgggttaaagaaacagaaaccgcaacccccaccacccccgaaacggggaaaacgaaaaaacagaccagcggccggccggcgcttagggggaggatgtcgccgacgccccttggccgccccggctgcaggggggcccggagagccgcggcacccggacgcgcccggaaagtctttcgcaccaccggcgatcggcacggccgcgcccccgcttttataaaggctcagatgacgcagcaaaaacaggccacagcaccacatgggtaggtgatgtaattttattttcctcgtctgcggcctaatggatttccgggcgcggtgcccctgtctgcagagcacttaacggattgatatctcgcgggcacgcgcgcccttaatggaccggcgcggggcggggggccggatacccacacgggcggggggggggtgtcgcgggccgtctgctggcccgcggccacataaacaatgactcggggcctttctgcctctgccgcttgtgtgtgcgcgcgccggctctgcggtgtcggcggcggcggcggcggtggccgccgtgttcggtctcggtagccggccggcgggtggactcgcggggggccggagggtggaaggcaggggggtgtaggatgggtatcaggacttccacttcccgtccttccatcccccgttcccctcggttgttcctcgcctcccccaacaccccgccgctttccgttggggttgttattgttgtcgggatcgtgcgggccgggggtcgccggggcaggggcgggggcgtgggcgggggtgctcgtcgatcgaccgggctcagtgggggcgtggggtgggtgggagaaggcgaggagactggggtgggggtgtcggtgggtggttgttttttttttttgtggttgttttttgtgtctgtttccgtcccccgtcacccccctccctccgtcccctccgtccccccgtcgcgggtgtttgtgtttgtttattccgacatcggtttatttaaaataaacacagccgttctgcgtgtctgttcttgcgtgtggctgggggcttatatgtggggtcccgggggcgggatggggtttagcggcggggggcggcgcgccggacggggcgctggagataacggcccccggggaacgggggaccggggctgggtatcccgaggtgggtgggtgggcggcggtggccgggccgggccgggccgggccgggtgggcggggtttggaaaaacgaggaggaggaggagaaggcggggggggagacggggggaaagcaaggacacggcccggggggtgggagcgcgggccgggccgctcgtaagagccgcgacccggccgccggggagcgttgtcgccgtcggtctgccggcccccgtccctcccttttttgaccaaccagcgccctcccccccaccaccattcctactaccaccaccaccaccacccccaccaccgacacctcccgcgcacccccgcccacatccccccaccccgcaccacgagcacggggtgggggtagcaggggatcaaaggggggcaaagccggcggggcggttcgggggggcgggagaccgagtaggcccgcccatacgcggcccctcccggcagccacgccccccagcgttgggtgtcacggggaaagagcaggggagagggggggagagggggagagggggggagagggggagaggggggagagggggagaggggggggggagaggggagaggggggggagaggggagagggggggagaggggagagggggggagaggggagagggggggagagggggtatataaaccaacgaaaagcgcgggaacggggatacggggcttgtgtggcacgacgtcgtggttgtgttactgggcaaacacttggggactgtaggtttctgtgggtgccgaccctaggcgctatggggattttgggttgggtcgggcttattgccgttggggttttgtgtgtgcgggggggcttgtcttcaaccgaatatgttattcggagtcgggtggctcgagaggtgggggatatattaaaggtgccttgtgtgccgctcccgtctgacgatcttgattggcgttacgagaccccctcggctataaactatgctttgatagacggtatatttttgcgttatcactgtcccggattggacacggtcttgtgggataggcatgcccagaaggcatattgggttaacccctttttatttgtggcgggttttctggaggacttgagtcaccccgcgtttcctgccaacacccaggaaacagaaacgcgcttggccctttataaagagatacgccaggcgctggacagtcgcaagcaggccgccagccacacacctgtgaaggctgggtgtgtgaactttgactattcgcgcacccgccgctgtgtagggcgacaggatttgggacctaccaacggaacgtctggacggaccccggttctgccgccggacgatgaagcgggcctgcaaccgaagcccctcaccacgccgccgcccatcatcgccacgtcggaccccaccccgcgacgggacgccgccacaaaaagcagacgccgacgaccccactcccggcgcctctaacgatgcctcgacggaaacccgtccgggttcggggggcgaaccggccgcctgtcgctcgtcagggccggcgggcgctcctcgccgccctagaggctgtcccgctggtgtgacgttttcctcgtccgcgccccccgaccctcccatggatttaacaaacgggggggtgtcgcctgcggcgacctcggcgcctctggactggaccacgtttcggcgtgtgtttctgatcgacgacgcgtggcggcccctgatggagcctgagctggcgaaccccttaaccgcccacctcctggccgaatataatcgtcggtgccagaccgaagaggtgctgccgccgcgggaggatgtgttttcgtggactcgttattgcacccccgacgaggtgcgcgtggttatcatcggccaggacccatatcaccaccccggccaggcgcacggacttgcgtttagcgtgcgcgcgaacgtgccgcctcccccgagtcttcggaatgtcttggtggccgtcaagaactgttatcccgaggcacggatgagcggccacggttgcctggaaaagtgggcgcgggacggcgtcctgttactaaacacgaccctgaccgtcaagcgcggggcggcggcgtcccactctagaatcggttgggaccgcttcgtgggcggagttatccgccggttggccgcgcgccgccccggcctggtgtttatgctctggggcgcacacgcccagaatgccatcaggccggaccctcgggtccattgcgtcctcaagttttcgcacccgtcgcccctctccaaggttccgttcggaacctgccagcatttcctcgtggcgaaccgatacctcgagacccggtcgatttcacccatcgactggtcggtttgaaaggcatcgacgtccggggtttttgtcggtgggggcttttgggtatttccgatgaataaagacggttaatggttaaacctctggtctcatacgggtcggtgatgtcgggcgtcgggggagagggagttccctctgcgcttgcgattctagcctcgtggggctggacgttcgacacgccaaaccacgagtcggggatatcgccagatacgactcccgcagattccattcggggggccgctgtggcctcacctaaccaacctttacacgggggcccggaacgggaggccacagcgccgtctttctccccaacgcgcgcggatgacggcccgccctgtaccgacgggccctacgtgacgtttgataccctgtttatggtgtcgtcgatcgacgaattagggcgtcgccagctcacggacaccatccgcaaggacctgcggttgtcgctggccaagtttagcattgcgtgcaccaagacctcctcgttttcgggaaacgccccgcgccaccacagacgcggggcgttccagcgcggcacgcgggcgccgcgcagcaacaaaagcctccagatgtttgtgttgtgcaaacgcgcccacgccgctcgagtgcgagagcagcttcgggtcgttattcagtcccgcaagccgcgcaagtattacacgcgatcttcggacgggcggctctgccccgccgtccccgtgttcgtccacgagttcgtctcgtccgagccaatgcgcctccaccgagataacgtcatgctggcctcgggggccgagtaaccgccccccccccatgccaccctcactgcccgtcgcgcgtgtttgatgttaataaataacacataaatttggctggttgtttgttgtctttaatggaccgcccgcaaggggggggggggcgtttcagtgtcgggtgacgagcgcgatccggccgggatcctaggaccccaaaagtttgtctgcgtattccagggtggggctcagttgaatctcccgcagcacctctaccagcaggtccgcggtgggctggagaaactcggccgtcccggggcaggcggttgtcgggggtggaggcgcggcgcccaccccgtgtgccgcgcctggcgtctcctctgggggcgacccgtaaatggttgcagtgatgtaaatggtgtccgcggtccagaccacggtcaaaatgccggccgtggcgctccgggcgctttcgccgcgcgaggagctgacccaggagtcgaacggatacgcgtacatatgggcgtcccacccgcgttcgagcttctggttgctgtcccggcctataaagcggtaggcacaaaattcggcgcgacagtcgataatcaccaacagcccaatgggggtgtgctggataacaacgcctccgcgcggcaggcggtcctggcgctcccggccccgtaccatgatcgcgcgggtgccgtactcaaaaacatgcaccacctgcgcggcgtcgggcagtgcgctggtcagcgaggccctggcgtggcataggctatacgcgatggtcgtctgtggattggacatctcgcggtgggtagtgagtcccccgggccgggttcggtggaactgtaaggggacggcgggttaatagacaatgaccacgttcggatcgcgcagagccgatagtatgtgctcactaatgacgtcatcgcgctcgtggcgctcccggagcggatttaagttcatgcgaaggaattcggaggaggtggtgcgggacatggccacgtacgcgctgttgaggcgcaggttgccgggcgtaaagcagatggcgaccttgtccaggctaaggccctgggagcgcgtgatggtcatggcaagcttggagctgatgccgtagtcggcgtttatggccatggccagctccgtagagtcaatggactcgacaaactcgctgatgttggtgttgacgacggacatgaagccgtgttggtcccgcaagaccacgtaaggcaggggggcctcttccagtaactcggccacgttggccgtcgcgtgccgcctccgcagctcgtccgcaaaggcaaacacccgtgtgtacgtgtatcccatgagcgtataattgtccgtctgcagggcgacggacatcagccccccgcgcggcgagccggtcagcatctcgcagccccggaagataacgttgtccacgtacgtgctaaagggggcgacttcaaatgcctccccgaagagctcttggaggattcggaatctcccgaggaaggcccgcttcagcagcgcaaactgggtgtgaacggcggcggtggtctccggttccccgggggtgtagtggcagtaaaacacgtcgagctgttgttcgtccagccccgcgaaaataacgtcgaggtcgtcgtcgggaaaatcgtccgggcccccgtcccgcggccccagttgcttaaaatcaaacgcacgctcgccgggggcgcctgcgtcggccattaccgacgcctgcgtcggcacccccgaagatttggggcgcagagacagaatctccgccgttagttctcccatgcgggcgtacgcgagggtcctctgggtcgcatccaggcccgggcgctgcagaaagttgtaaaaggagataagcccgctaaatatgagccgcgacaggaacctgtaggcaaactccaccgaagtctccccctgagtctttacaaagctgtcgtcacgcaacactgcctcgaaggcccggaacgtcccactaaacccaaaaaccagttttcgcaggcgcgcggtcaccgcgatctggctgttgaggacgtaagtgacgtcgttgcgggccacgaccagctgctgtttgctgtgcacctcgcagcgcatgtgccccgcgtcctggtcctggctctgcgagtagttggtgatgcggctggcgttggccgtgagccacttttcaatagtcaggccgggctggtgtgtcagccgtcggtattcgtcaaactccttgaccgacacgaacgtaagcacggggagggtgaacacgacgaactccccctcacgggtcaccttcaggtaggcgtggagcttggccatgtacgcgctcacctctttgtgggaggagaacagccgcgtccagccggggaggttggcggggttggtgatgtagttttccgggacgacgaagcgatccacgaactgcatgtgctcctcggtgatgggcaggccgtactccagcaccttcatgaggttaccgaactcgtgctcgacgcaccgtttgttgttaataaaaatggcccagctatacgagaggcgggcgtactcgcgcagcgtgcggttgcagatgaggtacgtgagcacgttctcgctctggcggacggaacaccgcagtttctggtgctcgaaggtcgactccagggacgccgtctgcgtcggcgagcccacacacaccaacacgggccgcaggcgggccgcgtactggggggtgtggtacagggcgttaatcatccaccagcaatacaccacggccgtgaggaggtgacgcccaaggagcccggcctcgtcgatgacgatcacgttgctgcgggtaaaggccggcagcgccccgtgggtggccggggccaaccgcgtcagggcgccctcggccaaccccagggtccgttccagggcggccagggcgcgaaactcgttccgcaactcctcgcccccggaggcggccagggcgcgcttcgtgaggtccaaaatcacctcccagtagtacgtcagatctcgtcgctgcaggtcctccagcgaggcggggttgctggtcagggtgtacgggtactgtcccagttgggcctggacgtgattcccgcgaaacccaaattcatgaaagatggtgttgatgggtcggctgagaaaggcgcccgagagtttggcgtacatgttttgggccgcaatgcgcgtggcgcccgtcaccacacagtccaagacctcgttgattgtctgcacgcacgtgctctttccggagccagcgttgccggtgataagatacaccgcgaacggaaactccctgaggggcaggcctgcgggggactctaaggccgccacgtcccggaaccactgcagacggggcacttgcgctccgtcgagctgttgttgcgagagctctcggatgcgcttaaggattggctgcaccccgtgcatagacgtaaaatttaaaaaggcctcggccctccctggaacggctggtcggtccccgggttgctgaaggtgcggcgggccgggtttctgtccgtctagctggcgctccccgccggccgccgccatgaccgcaccacgctcgtgggcccccactacgcgtgcgcggggggacacggaagcgctgtgctcccccgaggacggctgggtaaaggttcaccccacccccggtacgatgctgttccgtgagattctccacgggcagctggggtataccgagggccagggggtgtacaacgtcgtccggtccagcgaggcgaccacccggcagctgcaggcggcgatctttcacgcgctcctcaacgccaccacttaccgggacctcgaggcggactggctcggccacgtggcggcccgcggtctgcagccccaacggctggttcgccggtacaggaacgcccgggaggcggatatcgccggggtggccgagcgggtgttcgacacgtggcggaacacgcttaggacgacgctgctggactttgcccacgggttggtcgcctgctttgcgccgggcggcccgagcggcccgtcaagcttccccaaatatatcgactggctgacgtgcctggggctggtccccatattacgcaagcgacaagaagggggtgtgacgcagggtctgagggcgtttctcaagcagcacccgctgacccgccagctggccacggtcgcggaggccgcggagcgcgccggccccgggttttttgagctggcgctggccttcgactccacgcgcgtggcggactacgaccgcgtgtatatctactacaaccaccgccggggcgactggctcgtgcgagaccccatcagcgggcagcgcggagaatgtctggtgctgtggccccccttgtggaccggggaccgtctggtcttcgattcgcccgtccagcggctgtttcccgagatcgtcgcgtgtcactccctccgggaacacgcgcacgtctgccggctgcgcaataccgcgtccgtcaaggtgctgctggggcgcaagagcgacagcgagcgcggggtggccggtgccgcgcgggtcgttaacaaggtgttgggggaggacgacgagaccaaggccgggtcggccgcctcgcgcctcgtgcggcttatcatcaacatgaagggcatgcgccacgtaggcgacattaacgacaccgtgcgtgcctacctcgacgaggccggggggcacctgatagacgccccggccgtcgacggtaccctccctggattcggcaagggcggaaacagccgcgggtctgcgggccaggaccagggggggcgggcgccgcagcttcgccaggccttccgcacggccgtggttaacaacatcaacggcgtgttggagggctatataaataacctgtttggaaccatcgagcgcctgcgcgagaccaacgcgggcctggcgacccaattgcaggagcgcgaccgcgagctccggcgcgcaacagcgggggccctggagcgccagcagcgcgcggccgacctggcggccgagtccgtgaccggtggatgcggcagccgccctgcgggggcggacctgctccgggccgactatgacattatcgacgtcagcaagtccatggacgacgacacgtacgtcgccaacagctttcagcacccgtacatcccttcgtacgcccaggacctggagcgcctgtcgcgcctctgggagcacgagctggtgcgctgttttaaaattctgtgtcaccgcaacaaccagggccaagagacgtcgatctcgtactccagcggggcgatcgccgcattcgtcgccccctactttgagtcagtgcttcgggccccccgggtaggcgcgcccatcacgggctccgatgtcatcctgggggaggaggagttatgggatgcggtgtttaagaaaacccgcctgcaaacgtacctgacagacatcgcggccctgttcgtcgcggacgtccagcacgcagcgctgcccccgcccccctccccggtcggcgccgatttccggcccggcgcgtccccgcggggccggtccagatcgcggtcgcccggaagaactgcgccaggcgcgccggaccagggcgggggcatcgggcaccgggatggccgccgcgacggccgacgatgaggggtcggccgccaccatcctcaagcaggccatcgccggggaccgcagcctggtcgaggcggccgaggcgattagccagcagacgctgctccgcctggcctgcgaggtgcgccaggtcggcgaccgccagccgcggtttaccgccaccagcatcgcgcgcgtcgacgtcgcgcctgggtgccggttgcggttcgttctggacgggagtcccgaggacgcctatgtgacgtcggaggattactttaagcgctgctgcggccagtccagttatcgcggcttcgcggtggcggtcctgacggccaacgaggaccacgtgcacagcctggccgtgccccccctcgttctgctgcaccggttctccctgttcaaccccagggacctcctggactttgagcttgcctgtctgctgatgtacctggagaactgcccccgaagccacgccaccccgtcgacctttgccaaggttctggcgtggctcggggtcgcgggtcgccgcacgtccccattcgaacgcgttcgctgccttttcctccgcagttgccactgggtcctaaacacactcatgttcatggtgcacgtaaaaccgttcgacgacgagttcgtcctgccccactggtacatggcccggtacctgctggccaacaacccgccccccgttctctcggccctgttctgtgccaccccgacgagctcctcattccggctgccggggccgcccccccgctccgactgcgtggcctataaccccgccgggatcatggggagctgctgggcgtcggaggaggtgcgcgcgcctctggtctattggtggctttcggagaccccaaaacgacagacgtcgtcgctgttttatcagttttgttgaattttaggaaataaacccggttttgtttctgtggcctcccgacggatgcgcgtgtccttcctccgtcttggtgggtgggtgtctgtgtatcgcgtcccatctgtgcggagagggggggcatgtcggcacgtattcggacagactcaagcacacacgggggagcgctcttgtctcagggcaatgtttttattggtcaaactcaggcaaacagaaacgacatcttgtcgtcaaagggatacacaaacttccccccctctccccatactcccgccagcaccccggtaaacaccaactcaatctcgcgcaggatttcgcgcaggtgatgagcgcagtccacgggggggagcacaaggggccgcgggtatagatcgacggggacgccgaccgactccccgcctccgggacagacacgcacgacgcgccgccagtagtgctctgcgtccagcaaggcgccgccgcggaaggcagtggggggcaaggggtcgctagcctcaaagggggacacccgaacgctccagtactccgcgtccaaccgtttattaaacgcgtccacgataaggcggtcgcaggcgtcctccataaggccccgggccgtgagtgcgtcctcctccggcacgcctgccgttgtcaggcccaggacccgtcgcagcgtgtcgcgtacgaccccggccgccgtggtgtacgcgggcccgcggagaggaaatcccccaagatggtcagtgttgtcgcgggagttccagaaccacactcccgcctggttccaggcgactgcgtgggtgtagacgccctcgagggccaggcacagtgggtgccgcagccggaggccgttggccctaagcacggctcccacggccgtctcgatggcccgccgggcgtcctcgatcaccccggaagccgcatccgcgtcttgggggtccacgttaaagacaccccagaacgcacccccatcgcccccgcagaccgcgaacttcaccgagctggccgtctcctcgatctgcaggcagacggcggccattaccccacccaggagctgccgcagcgcagggcaggcgtcgcacgtgtccgggaccaggcgctccaagacggccccggcccagggctctgagggagcggccaccaccagcgcgtccagtcttgctaggcccgtccggccgtgggggtccgccagcccgctccccccgaggtcggccagggccgccaggagctgggcgcgaagtccggggaagcaaaaccgcgccgtccagacgggcccgacggccgcgggcgggtctaacagttggatgattttagtggcgggatgccaccgcgccaccgcctcccgcaccgcgggcaggaggcatccggctgccgccgaggccacgccgggccaggctcgcggggggaggacgaccctggcccccaccgcgggccaggcccccaggagcgcggcgtaagcggccgcggccccgcgcaccaggtcccgtgccgactcggccgtggccggcacggtgaacgtgggccaacccggaaaccccaggacggcaaagtacgggacgggtcccccccggacctcaaactcgggccccagaaaggcaaagacgggggccagggccccgggggcggcgtggaccgtggtatgccactgccggaaaagggcgacgagcgccggcgcggagaacttctcgccggcgcttacaaagtagtcgtaatcgcggggcagcagcacccgtgccgtgactcgttgcgggtgcccgcgtggccgcaggcccacctcgcacacctcgaccaggtccccgaacgcgccctccttcttgatcggcggaaacgcaagagtctggtattcgcgcgcaaatagcgcggttccggtggtgatgttaacggtcagcgaagcggcggacgcgcactggggggtgtcgcgaatggccgccaggcgcgcccacgccagccgcgcgtcgggatgctcggcaacgcgcgccgccagggccatagggtcgatgtcaatgttggcctccgcgaccaggagagcggcgcgaggggcggcgggcgggccccacgacgctctctcaactttcaccaccagtcccgtgcgtgggtccgagccgatacgcagcggggcgaacagggccaccggcccggtctggcgctccagggccgccaggacgcacgcgtacagcgcccgccacagagtcgggttctccaggggctccagcggggaggcggccggcgtcgtcgcggcgcgggcggccgccacgacggcctggacggagacgtccgcggagccgtagaaatcccgcagctccgtcgcggtgacggagacctccgcaaagcgcgcgcgaccctcccctgcggcgttgcgacatacaaaatacaccagggcgtggaagtactcgcgagcgcgggggggcagccataccgcgtaaagggtaatggcgctgacgctctcctccacccacacgatatctgcggtgtccatcgcacggcccctaaggatcacgggcggtctgtgggtcccatgctgccgtgcctggccgggcccggtgggtcgcggaaaccggtgacggggggggggcggtttttggggttggggtgggggtgggaaacggcccgggtccgggggccaacttggcccctcggtgcgttccggcaacagcgccgccggtccgcggacgaccacgtaccgaacgagtgcggtcccgagacttatagggtgctaaagttcaccgccccctgcatcatgggccaggcctcggtggggagctccgacagcgccgcctccaggatgatgtcagcgttggggttggcgctggatgagtgcgtgcgcaaacagcgcccccacgcaggcacgcgtagcttgaagcgcgcgcccgcaaactcccgcttgtgggccataagcagggcgtacagctgcctgtgggtccggcaggcgctgtggtcgatgtggtgggcgtccaacaaccccacgattgtctgtttggtgaggtttttaacgcgccccgccccgggaaacgtctgcgtgcttttggccatctgcacgccaaacagttcgccccagattatcttgaacagcgccaccgcgtggtccgtctcgctaacggacccgcgcgggggacagccgcttagggcgtcggcgacgcgcttgacggcttcctccgagagcagaagtccgtcggttacgttacagtggcccagttcgaacaccagctgcatgtagcggtcgtagtggggggtcagtaggtccagcacgtcatcggggccgaaggtcctcccagatcccccggccgccgagtcccaatgcaggcgcgcggccatggtgctgcacaggcacaacagctcccagacgggggttacgttcagggtggggggcagggccacgagctccagctctccggtgacgttgatcgtggggatgacgcccgtggcgtagtggtcatagatccgccgaaatatggcgctgctgcgggtggccatgggaacgcggagacaggcctccagcaacgccaggtaaataaaccgcgtgcgtcccatcaggctgttgaggttgcgcatgagcgcgacaatttccgccggcgcgacatcggaccggaggtatttttcgacgaaaagacccacctcctccgtctcggcggcctgggccggcagcgacgcctcgggatcccggcaccgcagctcccgtagatcgcgctgggccctgagggcgtcgaaatgtacgccccgcaaaaacagacagaagtcctttggggtcagggtatcgtcgtgtccccagaagcgcacgcgtatgcagtttagggtcagcagcatgtgaaggatgttaaggctgtccgagagacacgccagcgtgcatctctcaaagtagtgtttgtaacggaatttgttgtagatgcgcgacccccgccccagcgacgtgtcgcatgccgacgcgtcacagcgccccttgaaccggcgacacagcaggtttgtgacctgggagaactgcgcgggccactggccgcaggaactgaccacgtgattaaggagcatgggcgtaaagacgggctccgagcgcgccccggagccgtccatgtaaatcagtagctcccccttgcggagggtgcgcacccgtcccagggactggtacacggacaccatgtccggtccgtagttcatgggttttacgtaggcgaacatgccatcaaagtgcaggggatcgaagctgaggcccacggttacgaccgtcgtgtatataaccacgcggtattggccccacgtggtcacgtccccgaggggggtgagcgagtgaagcaacagcacgcggtccgtaaactgacggcagaaccgggccacgatctccgcgaaggagaccgtcgacgaaaaaatgcagatgttatcgcccccgccaaggcgcgcttccagctccccaaagaacgtggccccccgggcgtccggagaggcgtccggagacgggccgctcggcggcccgggcgggcgcagggcagcctgcaggagctcggtccccagacgcgggagaaacaggcaccggcgcgccgaaaacccgggcatggcgtactcgccgaccaccacatgcacgtttttttcgccccggagaccgcacaggaagtccaccaactgcgcgttggcggttgcgtccatggcgatgatccgaggacaggtgcgcagcaggcgtagcattaacgcatccacgcggcccagttgctgcatcgttggcgaatagagctggcccagcgtcgacataacctcgtccagaacgaggacgtcgtagttgttcagaaggttggggcccacgcgatgaaggctttccacctggacgataagtcggtggaaggggcggtcgttcataatgtaattggtggatgagaagtaggtgacaaagtcgaccaggcctgactcagcgaaccgcgtcgccagggtctgggtaaaactccgacgacaggagacgacgagcacactcgtgtccggagagtggatcgcttcccgcagccagcggatcagcgcggtagtttttcccgaccccattggcgcgcggaccacagtcacgcacctggccgtcggggcgctcgcgttggggaaggtgacgggtccgtgctgctgccgctcgatcgttgttttcgggtgaacccggggcacccattcggccaaatcccccccgtacaacatccgcgctagcgatacgctcgacgtgtactgttcgcactcgtcgtccccaatgggacgcccggcccccagaggatctcccgactccgcgccccccacgaaaggcatgaccggggcgcggacggcgtggtgggtctggtgtgtgcaggtggcgacgtttgtggtctctgcggtctgcgtcacggggctcctcgtcctggcctctgtgttccgggcacggtttccctgcttttacgccacggcgagctcttatgccggggtgaactccacggccgaggtgcgcgggggtgtagccgtgcccctcaggttggacacgcagagccttgtgggcacttatgtaatcacggccgtgttgttgttggccgcggccgtgtatgccgtggtcggcgccgtgacctcccgctacgaccgcgccctggacgcgggccgccgtctggctgcggcccgcatggccatgccgcacgccacgctgatcgccggaaacgtctgctcttggttgctgcagatcaccgtcctgttgctggcccatcgcaccagccagctggcccacctggtttacgtcctgcactttgcgtgtctggtgtattttgcggcccatttttgcaccaggggggtcctgagcgggacgtatctgcgtcaggtgcacggcctgatggagccggccccgactcatcatcgcgtcgttggcccggctcgagccgtgctgacaaacgccttgctgttgggcgtcttcctgtgcacggccgacgccgcggtatccctgaataccatcgccgcgttcaactttaatttttcggccccgggcatgctcatatgcctgaccgtgctgttcgcccttctcgtcgtatcgctgttgttggtggtcgagggggtgttgtgtcactacgtgcgcgtgttggtgggcccccacctgggggccgtggccgccacgggcatcgtcggcctggcatgcgagcactattacaccaacggctactacgttgtggagacgcagtggccgggggcccagacgggagtccgcgtcgccctcgccctggtcgccgcctttgccctcggcatggccgtgctccgctgcacccgcgcctatctgtatcacaggcggcaccacaccaaattttttatgcgcatgcgcgacacgcgacaccgcgcacattccgccctcaagcgcgtacgcagttccatgcgcggatcgcgagacggccgccacaggcccgcacccggcagcccgcccgggattcccgaatatgcggaagacccctacgcgatctcatacggcggccagctcgaccggtacggagattccgacggggagccgatttacgacgaggtggcggacgaccaaaccgacgtattgtacgccaagatacaacacccgcggcacctgcccgacgacgagcccatctatgacaccgttggggggtacgaccccgagcccgccgaggaccccgtgtacagcaccgtccgccgttggtagctgtttggttccgttttaataaaccgtttgtgtttaacccgaccgtggtgtatgtctggtgtgtggcgtccgatcccgttactatcaccgttccccccaaaccccggcgattgtgggtttttttaaaaacgacacgcgtgcgaccgtatacagaacattgttgttttttattcgctatcggacatggggggtggaaactgggtggcggggcaggcgcctccgggggttcgccggtgagtgtggcgcgaggggggatccgacgaacgcaggcgctgtctccccggggcccgcgtaaccccgcgcatatccgggggcacgtagaaattaccttcctcttcggactcgatatccacgacgtcaaagtcgtgggcggtcagcgagacgacctccccgtcgtcggtgatgaggacgttgtttcggcagcagcagggccgggtcccggagaacgagaggcccatagctcggcgagcgtgtcgtcgaacgccaggcggctgcttcgctgtatggccttatagatctccggatcgatgcggacgggggtaatgatcagggcgatcggaacggcctggttcgggagaatggacgccttgctgggtcctgcggccccgagagccccggcgccgtcctccaggcggaacgttacgccctcctccgcgctagtgcggtgcctgccgataaacgtcaccagatgcgggtggggggggcagtcggggaagtggctgtcgagcacgtagccctgcaccaagatctgcttaaagttcgggtgacgggggttcgcgaagacgggctcgcggcgtaccagatccccggagctccaggacacgggggagatggtgtggcgtccgaggtcgggggcgccaaacagaagcacctccgagacaacgccgctatttaactccaccaaggcccgatccgcggcggagcaccgccttttttcgcccgaggcgtgggcctctgaccaggcctggtcttgcgtgacgagagcctcctccgggccggggacgcgcccgggcgcgaagtatcgcacgctgggtttcgggatcgaccggataaatgcccggaacgcctccggggaccggtgtgccatcaagtcctcgtacgcggaggccgtggggtcgctggggtccatggggtcgaaagcgtacttggcccggcatttgacctcgtaaaaggccaggggggtcttggggactggggccaagtagccgtgaatgtcccgaggacagacgagaatatccagggacgccccgaccatccccgtgtgaccgtccatgaggaccccacacgtatgcacgttctcttcggcgaggtcgccgggttcgtggaagataaagcgccgcgtgtcggcgccggcctcgccgccgtcgtccgcgcggcccacgcagtagcgaaacagcaggcttcgggccgtcggctcgttcacccgcccgaacatcaccgccgaagactgtacatccggccgcaggctggcgttgtgcttcagccactggggcgagaaacacggaccctgggggccccagcggagggtggatgcggtcgtgtggccccgccggagcagggcccatagctggcagtcggcctggttttgcgtggccgcctcgtaaaaccccatgaggggccggggcgccacggcgtccgcggcggccgggggcccgcggcgcgtcaggcgccataggtgccggccgagtccgcggtccaccatacccgcctcctcgaggaccacggccagggaacacagataatccaggcgggcccagaggggaccgatggccagaggggcgcggacgccgcgcagcaacccgcgcaggtggcgctcgaacgtctcggctagtatatgggagggcagcgcgttggggatcaccgacgccgaccacatagagtcaaggtccggggagtcgggatcggcgtccgggtcgcgggcgtgggtgcccccaggagatagcggaatgtctggggtcggaggccctgaggcgtcagaaagtgccggcgacgcggcccggggcttttcgtctgcggtgtcggtggcgtgctgatcacgtggggggttaacgggcgaatgggagctcgggtccacagctgacgtcgtctggggtggggggggcaggggacggaaggtggttgttagcggaagactgttagggcgggggcgcttgggggggctgtcggggccacgaggggtgtcctcggccagggcccaggaacgcttagtcacggtgcgtcccggcggacatgctgggcctcccgtggactccatttccgagacgacgtggggggagcggtggttgagcgcgccgccgggtgaacgctgattctcacgacagcgcgtgccgcgcgcacgggttggtgtgacacaggcgggacaccagcaccaggagaggcttaagctcgggaggcagcgccaccgacgacagtatcgccttgtgtgtgtgctggtaatttatacaccgatccgtaaacgcgcgccgaatcttgggattgcggaggtggcgccggatgccctctgggacgtcatacgccaggccgtgggtgttggtctcggccgagttgacaaacagggctgggtgcagcacgcggcgataggcgagcagggccagggcgaagtccagcgacagctggttgttgaaatactggtaaccgggaaaccgggtcacgggtacgcccaggctcggggcgacgtacacgctaaccaccaactccagcagcgtctggccaagggcgtacaggtcaaccgctaacccgacgtcgtgcttcaggcggtggttggtaaattcggcccgttcgttgttaaggtatttcaccaacagctccgggggctggttatacccgtgacccaccagggtgtgaaagttggctgtggttagggcggtgggcatgccaaacatccggggggacttgaggtccggctcctggaggcaaaactgcccccgggcgatcgtggagttggagttgagggtgacgaggctaaagtcggcgaggacggcccgccggagcgagacggcgtccgaccgcagcatgacgaggatgttggcgcacttgatatccaggtggctgatcccgcaggtggtgtttaaaaacacaacggcgcgggccagctccgtgaagcactggtggagggccgtcgagaccgaggggtttgttgtgcgcagggacgccagttggccgatatacttaccgaggtccatgtcgtacgcggggaacactatctgtcgttgttgcagcgagaacccgaggggcgcgatgaagccgcggatgttgtgggtgcggccggcgcgtagagcgcactccccgaccaacagggtcgcgatgagctcaacggcaaaccactccttttcctttatggtcttaacggcaagcttatgttcgcgaatcagttggacgtcgccgtatcccccagaccccccgaagcttcgggccccggggatctcgagggtcgtgtagtgtagggcggggttgatggcgaacacggggctgcatagcttgcggatgcgcgtgagggtaaggatgtgcgagggggacgaggggggtgcggttaacgccgcctgggatctgcgcaggggcgggcggttcagtttggccgccgtaccgggcgtctcgggggacgcgcggcgatgagacgagcggctcattcgccatcgggatagtcccgcgcgaagccgctcgcggaggccggatcggtggcgggacccgtgggaggagcgggagccggcggcgtcctggagagaggggccgctggggcgcccggaggccccgtgtgggttggagtgtatgtaggatgcgagccaatccttgaaggactgttggcgtgcaccttgggggctgaggttagctgccacatgaccagcaggtcgctgtctgcgggactcatccatccttcggccaggtcgccgtcttcccacagagaagcgttggtcgctgcttcctcgagttgctcctcctggtccgcaagacgatcgtccacggcgtccaggcgctcaccaagcgccggatcgaggtaccgtcggtgtgcggttagaaagtcacgacgcgccgcttgctcctccacgcgaattttaacacaggtcgcgcgctgtcgcatcatctctaagcgcgcgcgggactttagccgcgcctccaattccaagtgggccgcctttgcagccataaaggcgccaacaaaccgaggatcttgggtgctgacgccctcccggtgcagctgcagggtctggtccttgtaaatctcggctcggaggtgcgtctcggccaggcgtcggcgcagggccgcgtgggcggcatctcggtccattccgccaccctgcgggcgacccggggggtgctctgatagtctcgcgtgcccaaggcccgtgatcggggtacttcgccgccgcgacccgccacccggtgtgcgcgatgtttggtcagcagctggcgtccgacgtccagcagtacctggagcgcctcgagaaacagaggcaacttaaggtgggcgcggacgaggcgtcggcgggcctcacaatgggcggcgatgccctacgagtgccctttttagatttcgcgaccgcgacccccaagcgccaccagaccgtggtcccgggcgtcgggacgctccacgactgctgcgagcactcgccgctcttctcggccgtggcgcggcggctgctgtttaatagcctggtgccggcgcaactaaaggggcgtgatttcgggggcgaccacacggccaagctggaattcctggcccccgagttggtacgggcggtggcgcgactgcggtttaaggagtgcgcgccggcggacgtggtgcctcagcgtaacgcctactatagcgttctgaacacgtttcaggccctccaccgctccgaagcctttcgccagctggtgcactttgtgcgggactttgcccagctgcttaaaacctccttccgggcctccagcctcacggagaccacgggccccccaaaaaaacgggccaaggtggacgtggccacccacggccggacgtacggcacgctggagctgttccaaaaaatgatccttatgcacgccacctactttctggccgccgtgctcctcggggaccacgcggagcaggtcaacacgttcctgcgtctcgtgtttgagatccccctgtttagcgacgcggccgtgcgccacttccgccagcgcgccaccgtgtttctcgtcccccggcgccacggcaagacctggtttctagtgcccctcatcgcgctgtcgctggcctcctttcgggggatcaagatcggctacacggcgcacatccgcaaggcgaccgagccggtgtttgaggagatcgacgcctgcctgcggggctggttcggttcggcccgagtggaccacgttaaaggggaaaccatctccttctcgtttccggacgggtcgcgcagtaccatcgtgtttgcctccagccacaacacaaacgtaagtcctcttttctttcgcatggctctcccaaggggccccgggtcgacccgacccacacccacccacccacccacatacacacacaaccagacgcgggaggaaagtctgccccgtgggcactgatttttattcgggatcgcttgaggaggcccgggcaacggcccgggcaacggtggggcaactcgtagcaaataggcgactgatgtacgaagagaagacacacaggcgccacccggcgctggtcggggggatgttgtccgcgccgcaccgtcccccgacgacctcttgcagacggtccgtgatgcaaggacggcggggggcctgcagcagggtgaccgtatccacgggatggccaaagagaagcggacacaggctagcatccccctggaccgccagggtacactgggccatcttggcccacagacacggggcgacgcagggacaggactccgttacgacggaggagagccacagtgcgttggcggaatcgatgtggggcggcggggcgcaggactcgcagccccccgggtggttggtgatcctggccaggagccatcccagatggcgggccctgcttcccggtggacagagcgaccccaggtcgctgtccatggcccagcagtagatctggccgctggggaggtgccaccaggcccccgggcccaaggcgcaacacgcgcccggctccgggggggtcttcgcggggaccagatacgcgccatccagctcgccgaccactggctcctccgcgagctgttcggtggttgggtcgggggtttcctccgggggggtggccgcccgtatgcgggcgaacgtgagggtgcacaggagcggggtcagggggtgcgtcacgctccggaggtggacgatcgcgcagtagcggcgctcgcggttaaagaaaaagagggcaaagaaggtgttcgggggcaaccgcagcgccttggggcgcgtcagatacagaaaaatctcgcagaagagggcgcgcccggggtctgggttaggaagggccacctgacacagaggctcggtgaggaccgttagacaccgaaagatcttgagccgctcgtccgcccgaacgacgcgccacacaaagacggagttgacaatgcgcgcgatagagtcgacgtccgtccccaggtcgtcgactctgtcgcgcgtgccgcgagctccggcccgggaatccggccggggcaaggtccccgggggaccaggcggcgccaggggccgccggggtcccagctgcgccatgccgggggcggggggagggcaaaccccagaggcgggggccaacggcgcggggaggagtgggtgggcgaggtggccgggggaaggcgcccgctagcgagaacggccgttcccggacgacaccttgcgacaaaacctaaggacagcggcccgcgcgacggggtccgagaggctaaggtaggccgcgatgttaatggtgaacgcaaagccgccgggaaagacaactatgccacagaggcggcgattaaaccccaggcagaggtaggcgtagctttccccgggcaggtattgctcgcagaccctgcgtggggctgtggaggggacggcctccatgaagcgacatttactctgctcgcgtttactgacgtcaccatccatcgccacggcgattggacgattgttaagccgcagcgtgtctccgcttgtgctgtagtagtcaaaaacgtaatggccgtcggagtcggcaaagcgggccgggaggtcgtcgccgagcgggacgacccgccgcccccgaccgccccgtccccccaggtgtgccaggacggccagggcatacgcggtgtgaaaaaaggcgtcgggggcggtcccctcgacggcgcgcatcaggttctcgaggagaatggggaagcgcctggtcacctcccccagccacgcgcgttggtcggggccaaagtcatagcgcaggcgctgtgagattcgagggccgccctgaagcgcggcccggatggcctggcccagggcccggaggcacgccagatgtatgcgcgcagtaaaggcgacctcggcggcgatgtcaaagggcggcaggacggggcgcgggtggcgcaggggcacctcgagcgcgggaaagcggagcagcagctccgcctgcccagcgggagacagctggtgggggcgcacgacgcgttctgcggcgcaggcctcggtcagggccgtggccagcgccgaggacagcagcggagggcgggcgcgtcgcccgccccacgccacggagttctcgtaggagacgacgacgaagcgctgtttggttccgtagtggtggcgcaggaccacggagatagaacgacggctccacagccagtccggccggtcgccgccggccagggcttcccatccgcgatccaaccactcgaccagcgaccgcggctttgcggtaccaggggtcagggttagaacgtcgttcaggatgtcctcgcccccgggcccgtggggcactggggccacaaagcggcccccgcctgggggctccagacccgccaacaccgcatctgcgtcagccgcccccatggcgcccccgctgacggcctggtgaaccagggcgccctggcggagccccgatgcaacgccacaggccgcacgcccggtccgagcgcggaccgggtggcggcgggtgacgtcctgcactgcccgctgaaccaacgcgaggatctcctcgttctcctgcgcgatggacacgtcctgggccgcggtcgtgtcgccgccgggggccgtcagctgctcctccggggagatgggggggtcggacgccccgacgatgggcgggtctgcgggcgcccccgcgtggggccgggccaagggctgcggacgcggggacgcgctttcccccagacccatggacaggtgggccgcagcctccttcgcggccggcggggcggcggcgccaagcagagcgacgtagcggcacaaatgccgacagacgcgcatgatgcgcgtgctgtcggccgcgtagcgcgtgttgggggggacgagctcgtcgtaactaaacagaatcacgcgggcacagctcgcccccgagccccacgcaaggcgcagcgccgccacggcgtacgggtcatagacgccctgtgcgtcacacaccacgggcaaggagacgaacaaccccccggcgctggacgcacgcggaaggaggccagggtgtgccggcacgacgggggccagaagctcccccaccgcatccgcgggcacgtaggcggcaaacgccgtgcaccacggggtacagtcgccggtggcatgagcccgagtctggatttcgacctggaagtttgcggccgtcccgagtccggggcggccgcgcatcagggcggccagagggattcccgcggccgccaggcactcgctggatatgatgacgtgaaccaaagacgagggccgacccgggacgtggccgagatcgtactggacctcgttggccaagtgcgcgttcatggttcgggggtgggtgtgggtgtgtaggcgatgcgggtcccccgagtccgcgggaagggcgcgggtttggcgcgcgtatgcgtattcgccaacggaggcgtgcgtgcttatgcgcggcgcgtttcttctgtctccagggaatccgaggccaggactttaacctgctctttgtcgacgaggccaactttattcgcccggatgcggtccagacgattatgggctttctcaaccaggccaactgcaagattatcttcgtgtcgtccaccaacaccgggaaggccagtacgagctttttgtacaacctccgcggggccgccgacgagcttctcaacgtggtgacctatatatgcgatgatcacatgccgcgggtggtgacgcacacaaacgccacggcctgttcttgttatatcctcaacaagcccgttttcatcacgatggacggggcggttcgccggaccgccgatttgtttctggccgattccttcatgcaggagatcatcgggggccaggccagggagaccggcgacgaccggcccgttctgaccaagtctgcgggggagcggtttctgttgtaccgcccctcgaccaccaccaacagcggcctcatggcccccgatttgtacgtgtacgtggatcccgcgttcacggccaacacccgagcctccgggaccggcgtcgctgtcgtcgggcggtaccgcgacgattatatcatcttcgccctggagcacttttttctccgcgcgctcacgggctcggcccccgccgacatcgcccgctgcgtcgtccacagtctgacgcaggtcctggccctgcatcccggggcgtttcgcggcgtccgggtggcggtcgagggaaatagcagccaggactcggccgtcgccatcgccacgcacgtgcacacagagatgcaccgcctactggcctcggagggggccgacgcgggctcgggccccgagcttctcttctaccactgcgagcctcccgggagcgcggtgctgtacccctttttcctgctcaacaaacagaagacgcccgcctttgaacactttattaaaaagtttaactccgggggcgtcatggcctcccaggagatcgtttccgcgacggtgcgcctgcagaccgacccggtcgagtatctgctcgagcagctgaataacctcaccgaaaccgtctcccccaacacggacgtccgtacgtattccggaaaacggaacggcgcctcggatgaccttatggtcgccgtcattatggccatctaccttgcggcccaggccggacctccgcacacattcgctcccatcacacgcgtttcgtgagcgcccaataaacacacccaggtatgctacgcacgaccacggtgtcgcctgttaagggggggggaagggggtgttggcgggaagcgtgggaacacgggggattctctcacgaccggcaccagtaccacccccctgtgaacacagaaaccccaacccaaatcccataaacatacgacacacaggcatattttggaatttcttaggtttttatttatttaggtatgctggggtttctccctggatgcccacccccacccccccccgtgggtctagccgggccttagggatagcgtataacgggggccatgtctccggaccgcacaacggccgcgccgtcaaaggtgcacacccgaaccacgggagccagggccaaggtgtctcctagttggcccgcgtgggtcagccaggcgacgagcgcctcgtagagcggcagccttcgctctccatcctgcatcagggccggggcttcggggtgaatgagctgggcggcctcccgcgtgacactctgcatctgcaggagagcgttcacgtacccgtcctgggcacttagcgcaaagagccgggggattagcgtaaggatgatggtggttccctccgtgatcgagtaaaccatgttaaggaccagcgatcgcagctcggcgtttacggggccgagttgttggacgtccgccagcagcgagaggcgactcccgttgtagtacagcacgttgaggtctggcagccctccggggtttctggggctggggttcaggtcccggatgcccctggccacgagccgcgccacgatttcgcgcgccaggggcgatggaagcggaacgggaaaccgcaacgtgaggtccagcgaatccaggcgcacgtccgtcgcttggccctcgaacacgggcgggacgaggctgatggggtccccgttacagagatctacgggggaggtgttgcgaaggttaacggtgccggcgtgggtgaggcccacgtccagggggcaggcgacgattcgcgtgggaagcacccgggtgatgaccgcggggaagcgccttcggtacgccagcaacagccccaacgtgtcgggactgacgcctccggagacgaaggattcgtgcgccacgtcggccagcgtcagttgccggcggatggtcggcaggaataccacccgcccttcgcagcgctgcagcgccgccgcatcggggcgcgagatgcccgagggtatcgcgatgtcagtttcaaagccgtccgccagcatggcgccgatccacgcggcagggagtgcagtggtggttcgggtggcgggaggagcgcggtgggggtcagcggcgtagcagagacgggcgaccaacctcgcataggacggggggtgggtcttagggggttgggaggcgacagggaccccagagcatgcgcggggaggtctgtcgggcccagacgcaccgagagcgaatccgtccatggagtcccggcctgggttttatggggcccggccctcggaatcgcggcttgtcggcggggacaaagggggcggggctagggggcttgcggaaacagaagacgtgtgggataaaagaatcgcactaccccaaggaagggcggggcggtttattacagagccagtcccttgagcggggatgcgtcatagacgagatactgcgcgaagtgggtctcccgcgcgtgggcttccccgttgcgggcgctgcggaggagggcggggtcgctggcgcaggtgagcgggtaggcctcctgaaacaggccacacgggtcctccacgagttcgcggcaccccggggggcgcttaaactgtacgtcgctggcggcggtggccgtggacaccgccgaacccgtctccacgatcaggcgctccaggcagcgatgtttggcggcgatgtcggccgacgtaaagaacttaaagcaggggctgagcaccggcgaggccccgttgaggtggtaggccccgttatagagcaggtccccgtacgaaaatcgctgcgacgcccacgggttggccgtggccgcgaaggcccgggacgggtcgctctggccgtggtcgtacatgagggcggtgacatccccctccttgtcccccgcgtaaacgcccccggcggcgcgtccccgggggttgcagggccggcggaagtagttgacgtcggtcgacacgggggtggcgataaactcacacacggcgtcctggccgtggtccatccctgcgcgccgcggcacctgggcgcacccgaacacggggacgggctgggccggccccaggcggtttcccgccacgaccgcgttccgcaggtacacggctgccgcgttgtccagtagagggggagccccgcggcccaggtaaaagttttggggaaggttgcccatgtcggtgacggggttgcggacggttgccgtggccacgacggcggtgtagcccacgcccaggtccacgttcccgcgcggctgggtgagcgtgaagtttacccccccgccagtttcatgccgggccacctggagctggcccaggaagtacgcctccgacgcgcgctccgagaacagcacgttctcagtcacaaagcggtcctgtcggacgacggtgaacccaaacccgggatggaggcccgtcttgagctgatgatgcaaggccacgggactgatcttgaagtaccccgccatgagcgcgtaggtcagcgcgttctccccggccgcgctctcgcggacgtgctgcacgacgggctgtcggatcgacgaaaagtagttggcccccagagccggggggaccagggggacctgccgcgacaggtcgcgcagggccggggggaaattgggcgcgttcgccacgtggtcggccccggcgaacagcgcgtggacggggagggggtaaaaatagtcgccattttggatggtatggtccagatgctggggggccatcagcaggattccggcgtgcaacgccccgtcgaatatgcgcatgttggtggtggacgcggtgttggcgcccgcgtcgggcgccgccgagcagagcagcgccgttgtgcgttcggccatgttgtgggccagcacctgcagcgtgagcatggcgggcccgtccactaccacgcgcccgttgtgaaacatggcgttgaccgtgttggccaccagattggccgggtgcagggggtgcgcggggtccgtcacggggtcgctggggcaatcctcgccgggggtgatctccgggaccaccatgttctgcagggtggcgtatacgcggtcgaagcgaacccccgcggtgcagcagcggccccgcgagaaggcgggtaccatcacgtagtagtaaatcttgtggtgcacggtccagtccgccccccggtgcggccggtcgtccgcggcgtccgcggctcgggcctgggtgttgtgcagcagctggccgtcgttgcggttgaagtccgcggtcgccacgttacacgccgctgcgtacacggggtcgtggccccccgcgctaacccggcagtcgcgatggcggtccagggccgcgcgccgcatcagggcgtcgcagtcccacacgaggggtggcagcagcgccgggtctcgcattaggtgattcagttcggcttgcgcctgcccgcccagttccgggccggtcagggtaaagtcatcaaccagctgggccagggcctcgacgtgcgccaccaggtcccggtacacggccatgcactcctcgggaaggtctcccccgaggtaggtcacgacgtacgagaccagcgagtagtcgttcacgaacgccgcgcaccgcgtgttgttccagtagctggtgatgcactggaccacgagccgggccagggcgcagaagacgtgctcgctgccgtgtatggcggcctgcagcaggtaaaacaccgccgggtagttgcggtcttcgaacgccccgcgaacggcggcgatggtggcgggggccatggcgtggcgtcccacccccagctccaggccccgggcgtcccggaacgccgccggacatagcgccaggggcaagttgccgttcaccacgcgccaggtggcctggatctcccccgggccggccgggggaacgtccccccccggcagctccacgtcggccacccccacgaagaagtcgaacgcggggtgcagctcaagagccaggttggcgttgtcgggctgcataaactgctccggggtcatctggccttccgcgacccatcggacccgcccgtgggccaggcgctgcccccaggcgttcaaaaacagctgctgcatgtctgcggcggggccggccggggccgccacgtacgccccgtacggattggcggcttcgacggggtcgcggttaaggcccccgaccgccgcgtcaacgttcatcagcgaagggtggcacacggtcccgatcgcgtgttccagagacaggcgcagcacctggcggtccttcccccaaaaaaacagctggcggggcgggaaggcgcggggatccgggtggccgggggcggggactaggtccccggcgtgcgcggcaaaccgttccatgaccggattgaacaggcccaggggcaggacgaacgtcaggtccatggcgcccaccagggggtagggaacgttggtggcggcgtagatgcgcttctccagggcctccaaaaagatcagcttctcgccgatggacaccagatccgcgcgcacgcgcgtcgtctggggggcgctctcgagctcgtccagcgtctgccggttcaggtcgagctgctcctcctgcatctccagcaggtggcggcccacgtcgtccagacttcgcacggccttgcccatcacgagcgccgtgaccaggttggccccgttcaggaccatctcgccgtacgtcaccggcacgtcggcttcggtgtcctccactttcaggaaggactgcaggaggcgctgtttgatcggggcggtggtgacgagcaccccgtcgaccggacgcccgcgcgtgtcggcatgcgtcagacggggcacggccacggagggctgcgtggccgtggtgaggtccacgagccaggcctcgacggcctcccggcggtggcccgccttgcccaggaaaaagctcgtctcgcagaagcttcgctttagctcggcgaccagggtcgcccgggccaccctggtggccaggcggccgttgtccaggtatcgttgcatcggcaacaacaaagccaggggcggcgccttttccagcagcacgtgcagcatctggtcggccgtgccgcgctcaaacgccccgaggacggcctggacgttgcgagcgagctgttggatggcgcgcaactggcgatgcgcgctgatacccgtcccgtccagggcctcccccgtgagcagggcgatggcctcggtggccaggctgaaggcggcgttcagggcccggcggtcgataatcttggtcatgtaattgtgtgtgggttgctcgatggggtgcgggccgtcgcgggcaatcagcggctggtggacctcgaactgtacgcgcccctcgttcatgtaggccagctccggaaacttggtacacacgcacgccaccgacaacccgagctccagaaagcgcacgagcgacagggtgttgcaatacgaccccaacagggcgtcgaactcgacgtcatacaggctgtttgcatcggagcgcacgcgggaaaaaaaatcgaacaggcgtcgatgcgacgccacctcgatcgtgctaaggagggacccggtcggcaccatggccgcggcataccggtatcccggagggtcgcggttgggagcggccatggggtcgcgtggagatcggctgtctctagcgatattggcccggggaggctaagatccaccccaacgcccggccacccgtgtacgtgcccgacggcccaaggtccaccgaaagacacgacgggcccggacccaaaaaggcgggggatgctgtgtgagaggccgggtgtcggtcgggggggaaaggcaccgggagaaggctgcggcctcgttccaggagaacccagtgtccccaacagacccggggacgtgggatcccaggccttatataccccccccgccccacccccttaattaacaatacgcaaaccgcctctccccgcgcgttggccgattcattaatgcagctggcacgacaggtttcccgactggaaagcgggcagtgagcgcaacgcaattaatgtgagttagctcactcattaggcaccccaggctttacactttatgcttccggctcgtatgttgtgtggaattgtgagcggataacaatttcacacatactagagaaagaggagaaatactagatggcttcctccgaagacgttatcaaagagttcatgcgtttcaaagttcgtatggaaggttccgttaacggtcacgagttcgaaatcgaaggtgaaggtgaaggtcgtccgtacgaaggtacccagaccgctaaactgaaagttaccaaaggtggtccgctgccgttcgcttgggacatcctgtccccgcagttccagtacggttccaaagcttacgttaaacacccggctgacatcccggactacctgaaactgtccttcccggaaggtttcaaatgggaacgtgttatgaacttcgaagacggtggtgttgttaccgttacccaggactcctccctgcaagacggtgagttcatctacaaagttaaactgcgtggtaccaacttcccgtccgacggtccggttatgcagaaaaaaaccatgggttgggaagcttccaccgaacgtatgtacccggaagacggtgctctgaaaggtgaaatcaaaatgcgtctgaaactgaaagacggtggtcactacgacgctgaagttaaaaccacctacatggctaaaaaaccggttcagctgccgggtgcttacaaaaccgacatcaaactggacatcacctcccacaacgaagactacaccatcgttgaacagtacgaacgtgctgaaggtcgtcactccaccggtgcttaataacgctgatagtgctagtgtagatcgctactagagccaggcgtttaaacatttataccctgcgcaggctggaccgaggaccgcaaggtgcggcggtgcacaagcaattgacaactaaccaccgtgtattcattatggtaccaggaactttaagccgagtcaatgaagctcgcattacagtgtttaccgcatcttgccgttactcacaaactgtgatccaccacaagtcaagccattgcctctctgacac

SEQ ID NO: 2 - DNA, 16421 bp, synthetic construct
  source 1..16421: mol_type = other DNA
caattcgccctatagtgagtcgtattacgcgcgctcactggccgtcgttttacaacgtcgtgactgggaaaaccctggcgttacccaacttaatcgccttgcagcacatccccctttcgccagctggcgtaatagcgaagaggcccgcaccgatcgcccttcccaacagttgcgcagcctgaatggcgaatggcgcgacgcgccctgtagcggcgcattaagcgcggcgggtgtggtggttacgcgcagcgtgaccgctacacttgccagcgccctagcgcccgctcctttcgctttcttcccttcctttctcgccacgttcgccggctttccccgtcaagctctaaatcgggggctccctttagggttccgatttagtgctttacggcacctcgaccccaaaaaacttgattagggtgatggttcacgtagtgggccatcgccctgatagacggtttttcgccctttgacgttggagtccacgttctttaatagtggactcttgttccaaactggaacaacactcaaccctatctcggtctattcttttgatttataagggattttgccgatttcggcctattggttaaaaaatgagctgatttaacaaaaatttaacgcgaattttaacaaaatattaacgtttacaatttcctgatgcggtattttctccttacgcatctgtgcggtatttcacaccgcatagggtaataactgatataattaaattgaagctctaatttgtgagtttagtatacatgcatttacttataatacagttttttagttttgctggccgcatcttctcaaatatgcttcccagcctgcttttctgtaacgttcaccctctaccttagcatcccttccctttgcaaatagtcctcttccaacaataataatgtcagatcctgtagacaccacatcatccacggttctatactgttgacccaatgcatctcccttgtcatctaaacccacaccgggtgtcataatcaaccaatcgtaaccttcatctcttccacccatgtctctttgagcaataaagccgataacaaaatctttgtcgctcttcgcaatgtcaacagtacccttagtatattctccagtagatagggagcccttgcatgacaattctgctaacatcaaaaggcctctaggttcctttgttacttcttctgccgcctgcttcaaaccgctaacaatacctgggcccaccacaccgtgtgcattcgtaatgtctgcccattctgctattctgtatacacccgcagagtactgcaatttgactgtattaccaatgtcagcaaattttctgtcttcgaagagtaaaaaattgtacttggcggataatgcctttagcggcttaactgtgccctccatggaaaaatcagtcaagatatccacatgtgtttttagtaaacaaattttgggacctaatgcttcaactaactccagtaattccttggtggtacgaacatccaatgaagcacacaagtttgtttgcttttcgtgcatgatattaaatagcttggcagcaacaggactaggatgagtagcagcacgttccttatatgtagctttcgacatgatttatcttcgtttcctgcaggtttttgttctgtgcagttgggttaagaatactgggcaatttcatgtttcttcaacactacatatgcgtatatataccaatctaagtctgtgctccttccttcgttcttccttctgttcggagattaccgaatcaaaaaaatttcaaagaaaccgaaatcaaaaaaaagaataaaaaaaaaatgatgaattgaattgaaaagctgtggtatggtgcactctcagtacaatctgctctgatgccgcatagttaagccagccccgacacccgccaacacccgctgacgcgccctgacgggcttgtctgctcccggcatccgcttacagacaagctgtgacaaagggcctcgtgatacgcctatttttataggttaatgtcatgataataatggtttcttaggacggatcgcttgcctgtaacttacacgcgcctcgtatcttttaatgatggaataatttgggaatttactctgtgtttatttatttttatgttttgtatttggattttagaaagtaaataaagaaggtagaagagttacggaatgaagaaaaaaaaataaacaaaggtttaaaaaatttcaacaaaaagcgtactttacatatatatttattagacaagaaaagcagattaaatagatatacattcgattaacgataagtaaaatgtaaaatcacaggattttcgtgtgtggtcttctacacagacaagatgaaacaattcggcattaatacctgagagcaggaagagcaagataaaaggtagtatttgttggcgatccccctagagtcttttacatcttcggaaaacaaaaactattttttctttaatttctttttttactttctatttttaatttatatatttatattaaaaaatttaaattataattatttttatagcacgtgatgaaaaggacccaggtggcacttttcggggaaatgtgcgcggaacccctatttgtttatttttctaaatacattcaaatatgtatccgctcatgagacaataaccctgataaatgcttcaataatattgaaaaaggaagagtatgagtattcaacatttccgtgtcgcccttattcccttttttgcggcattttgccttcctgtttttgctcacccagaaacgctggtgaaagtaaaagatgctgaagatcagttgggtgcacgagtgggttacatcgaactggatctcaacagcggtaagatccttgagagttttcgccccgaagaacgttttccaatgatgagcacttttaaagttctgctatgtggcgcggtattatcccgtattgacgccgggcaagagcaactcggtcgccgcatacactattctcagaatgacttggttgagtactcaccagtcacagaaaagcatcttacggatggcatgacagtaagagaattatgcagtgctgccataaccatgagtgataacactgcggccaacttacttctgacaacgatcggaggaccgaaggagctaaccgcttttttgcacaacatgggggatcatgtaactcgccttgatcgttgggaaccggagctgaatgaagccataccaaacgacgagcgtgacaccacgatgcctgtagcaatggcaacaacgttgcgcaaactattaactggcgaactacttactctagcttcccggcaacaattaatagactggatggaggcggataaagttgcaggaccacttctgcgctcggcccttccggctggctggtttattgctgataaatctggagccggtgagcgtggatctcgcggtatcattgcagcactggggccagatggtaagccctcccgtatcgtagttatctacacgacggggagtcaggcaactatggatgaacgaaatagacagatcgctgagataggtgcctcactgattaagcattggtaactgtcagaccaagtttactcatatatactttagattgatttaaaacttcatttttaatttaaaaggatctaggtgaagatcctttttgataatctcatgaccaaaatcccttaacgtgagttttcgttccactgagcgtcagaccccgtagaaaagatcaaaggatcttcttgagatcctttttttctgcgcgtaatctgctgcttgcaaacaaaaaaaccaccgctaccagcggtggtttgtttgccggatcaagagctaccaactctttttccgaaggtaactggcttcagcagagcgcagataccaaatactgtccttctagtgtagccgtagttaggccaccacttcaagaactctgtagcaccgcctacatacctcgctctgctaatcctgttaccagtggctgctgccagtggcgataagtcgtgtcttaccgggttggactcaagacgatagttaccggataaggcgcagcggtcgggctgaacggggggttcgtgcacacagcccagcttggagcgaacgacctacaccgaactgagatacctacagcgtgagctatgagaaagcgccacgcttcccgaagggagaaaggcggacaggtatccggtaagcggcagggtcggaacaggagagcgcacgagggagcttccagggggaaacgcctggtatctttatagtcctgtcgggtttcgccacctctgacttgagcgtcgatttttgtgatgctcgtcaggggggcggagcctatggaaaaacgccagcaacgcggcctttttacggttcctggccttttgctggccttttgctcacatgttctttcctgcgttatcccctgattctgtggataaccgtattaccgcctttgagtgagctgataccgctcgccgcagccgaacgaccgagcgcagcgagtcagtgagcgaggaagcggaagagcgcccaatacgcaaaccgcctctccccgcgcgttggccgattcattaatgcagctggcacgacaggtttcccgactggaaagcgggcagtgagcgcaacgcaattaatgtgagttacctcactcattaggcaccccaggctttacactttatgcttccggctcctatgttgtgtggaattgtgagcggataacaatttcacacaggaaacagctatgaccatgattacgccaagcgcgcaattaaccctcactaaagggagctagcccccggcggtctctaagaaacaccgccccccctccttcataccaccgagcatggcggccgctcagtggcgcgcctcgagggatccagacatgataagatacattgatgagtttggacaaaccacaactagaatgcagtgaaaaaaatgctttatttgtgaaatttgtgatgctattgctttatttgtaaccattataagctgcaataaacaagttaacaacaacaattgcattcattttatgtttcaggttcagggggaggtgtgggaggttttttaaagcaagtaaaacctctacaaatgtggtatggctgattatgatctctagtcaaggcactatacatcaaatattccttattaacccctttacaaattaaaaagctaaaggtacacaatttttgagcatagttattaatagcagacactctatgcctgtgtggagtaagaaaaaacagtatgttatgattataactgttatgcctacttataaaggttacagaatatttttccataattttcttgtatagcagtgcagctttttcctttgtggtgtaaatagcaaagcaagcaagagttctattactaaacacagcatgactcaaaaaacttagcaattctgaaggaaagtccttggggtcttctacctttctcttcttttttggaggagtagaatgttgagagtcagcagtagcctcatcatcactagatggcatttcttctgagcaaaacaggttttcctcattaaaggcattccaccactgctcccattcatcagttccataggttggaatctaaaatacacaaacaattagaatcagtagtttaacacattatacacttaaaaattttatatttaccttagagctttaaatctctgtaggtagtttgtccaattatgtcacaccacagaagtaaggttccttcacaaagatccggaccaaagcggccatcgtgcctccccactcctgcagttcgggggcatggatgcgcggatagccgctgctggtttcctggatgccgacggatttgcactgccggtagaactccgcgaggtcgtccagcctcaggcagcagctgaaccaactcgcgaggggatcgagcccggggtgggcgaagaactccagcatgagatccccgcgctggaggatcatccagccggcgtcccggaaaacgattccgaagcccaacctttcatagaaggcggcggtggaatcgaaatctcgtgatggcaggttgggcgtcgcttggtcggtcatttcgaaccccagagtcccgctcagaagaactcgtcaagaaggcgatagaaggcgatgcgctgcgaatcgggagcggcgataccgtaaagcacgaggaagcggtcagcccattcgccgccaagctcttcagcaatatcacgggtagccaacgctatgtcctgatagcggtccgccacacccagccggccacagtcgatgaatccagaaaagcggccattttccaccatgatattcggcaagcaggcatcgccatgggtcacgacgagatcctcgccgtcgggcatgcgcgccttgagcctggcgaacagttcggctggcgcgagcccctgatgctcttcgtccagatcatcctgatcgacaagaccggcttccatccgagtacgtgctcgctcgatgcgatgtttcgcttggtggtcgaatgggcaggtagccggatcaagcgtatgcagccgccgcattgcatcagccatgatggatactttctcggcaggagcaaggtgagatgacaggagatcctgccccggcacttcgcccaatagcagccagtcccttcccgcttcagtgacaacgtcgagcacagctgcgcaaggaacgcccgtcgtggccagccacgatagccgcgctgcctcgtcctgcagttcattcagggcaccggacaggtcggtcttgacaaaaagaaccgggcgcccctgcgctgacagccggaacacggcggcatcagagcagccgattgtctgttgtgcccagtcatagccgaatagcctctccacccaagcggccggagaacctgcgtgcaatccatcttgttcaatcatgcgaaacgatcctcatcctgtctcttgatcagatcttgatcccctgcgccatcagatccttggcggcaagaaagccatccagtttactttgcagggcttcccaaccttaccagagggcgccccagctggcaattccggttcgcttgctgtccataaaaccgcccagtctagctatcgccatgtaagcccactgcaagctacctgctttctctttgcgcttgcgttttcccttgtccagatagcccagtagctgacattcatccggggtcagcaccgtttctgcggactggctttctacgtgttccgcttcctttagcagcccttgcgccctgagtgcttgcggcagcgtgaagctagctttttgcaaaagcctaggcctccaaaaaagcctcctcactacttctggaatagctcagaggccgaggcggcctcggcctctgcataaataaaaaaaattagtcagccatggggcggagaatgggcggaactgggcggagttaggggcgggatgggcggagttaggggcgggactatggttgctgactaattgagatgcatgctttgcatacttctgcctgctggggagcctggggactttccacacctggttgctgactaattgagatgcatgctttgcatacttctgcctgctggggagcctggggactttccacaccctaactgacacacattccacagctgcctcgcgcgtttcggtgatgacggtgaaaacctctgacacatgcagctcccggagacggtcacagcttgtctgtaagcggatgccgggagcagacaagcccgtcagggcgcgtcagcgggtgttggcgggtgtcggggcgcagccatgacccagtcacgtagcgatagcggagtgtatactggcttaactatgcggcatcagagcagattgtactgagagtgcacctcactagtcatgcctgggtgtgggttggtaaccaacacgcccatcccctcgtctcctgtgattctctggctgcaccgcattcttgttttctaactatgttcctgtttctgtctccccccccacccctccgccccaccccccaacacccacggatcccctcgagtttactccctatcagtgatagagaacgtatgaagagtttactccctatcagtgatagagaacgtatgcagactttactccctatcagtgatagagaacgtataaggagtttactccctatcagtgatagagaacgtatgaccagtttactccctatcagtgatagagaacgtatctacagtttactccctatcagtgatagagaacgtatatccagtttactccctatcagtgatagagaacgtataagctttgcttatgtaaaccagggcgcctataaaagagtgctgattttttgagtaaacttcaattccacaacacttttgtcttataccaactttccgtaccacttcctaccctcgtaaagaattcatggaaccaaggcctggagcttccactagacgccccgaaggaagaccacaacgggaacctgctccagacgtgtgggtattcccttgtgatcgcgatctcccagattcaagtgatagcgaagctgaaacagaggtcggtggacgcggtgatgctgatcatcacgatgatgattctgcttctgaagccgattctaccgatactgagctctttgaaacaggtttattgggacctcaaggtgtcgacggcggagcagtgtccggtggttccccgcctagagaagaggatcctgggagctgtggcggggctccaccgcgcgaagatggcggttcagatgaaggtgatgtttgtgctgtctgtaccgacgaaattgccccgcatctcagatgtgatacttttccttgtatgcatcggttttgtattccttgtatgaagacatggatgcagcttcgaaatacttgtcctctctgtaatgctaaacttgtttatctcattgtcggggttacaccatctggtagcttttcaactattcctatagtaaatgatcctcaaacaagaatggaagcagaagaagctgtgcgggcaggaactgctgtcgatttcatatggactggtaaccaaaggtttgctccaagatatttgacattgggcggtcataccgtaagagcattgtccccaactcatccagaaccgacaaccgatgaagacgatgatgatttggatgatgcggattatgtgcccccagcacctaggagaacaccaagagctcccccaagacggggagcagctgctccacctgtcactggtggcgctagtcatgctgcacctcaaccagcagccgcacgaacggccccgccaagtgcacctattggcccccatgggtcatcaaatacaaatacaacaacaaattcctctggaggaggcggatctcgacaatcacgtgcagccgtccctagaggtgccagcgggccaagcggcggcgtgggtgtggtcgaggcagaagctggaagaccaagagggcgtacagggccactggtgaatcggccggcaccactcgccaataatcgcgatcctatcgtaatttcagattctccgcctgctagtccgcatcgaccgccagcagccccaatgccgggatctgcacctagacctgggccgcctgcaagcgcagcagcaagcggaccagctcggccacgagcagcagtagctccctgcgtccgtgctcccccacctggcccagggccaagagcaccagctccaggagctgaaccagcagcaaggccagccgatgcccgtagagtcccacaatcccattccagcttggcccaagctgccaatcaggagcaaagcctttgtcgtgcccgcgctaccgtagcccgtgggagcggtggccccggagtagaaggcggtcatggcccatctcggggcgcggcgccgagcggggcagctccgtctggagctccacctctgccatctgcagcgagtgtagaacaagaagccgccgttaggcctcgaaaacgccggggctccggtcaagagaatccgagcccacaaagcacacgcccaccgctggcccccgctggagctaaacgagcagccacccatccgccatctgatagcggccctggcggtcggggtcaaggcggcccaggaacacctctcaccagctccgccgcatcagcaagctcttcatctgcgtcaagctcttcagcacccacaccagccggtgcaacatcctctgctacgggcgcagcaagctcatctgccagcgcatctagcggtggcgctgtaggggcgttgggcggcaggcaggaagagacttctctgggacctcgtgccgcaagcggtccacgcggtcctcgcaaatgcgctcgcaaaactagacatgcagaaacgagtggcgctgtgccagctggtggactgactagatatttacctattagcggcgtatcctcagttgtggcattgtccccatatgtaaataaaacaattactggagattgtttgcctattctcgatatggaaactggcaatattggcgcatatgtcgtgcttgtagatcaaactggtaatatggctacacgcctcagggctgcagtgccaggatggtctcgtcgaacattgttgcctgaaactgccggaaatcatgttaccccacctgaatatcccacagcgcctgcaagcgaatggaatagtctgtggatgacgcctgttggaaatatgctctttgatcaagggacgttagttggggcgttggattttaggtcccttcgctcccgccatccttggtctggtgaacaaggtgccagcactcgagatgaaggcaagcagggctcaggcgccaccaactttagcctgctgaagcaggcaggcgacgtcgaggagaaccccggccctgaattcacgcgtatggctagtgaaaataaacaacggccaggttcaccgggtcctacagatggcccaccaccaacaccatctcccgatagagatgaacgtggtgcgcttggctggggtgctgaaaccgaagaaggcggagatgatccggatcatgatccagatcatccgcatgatttagatgatgcacgtcgcgatggccgtgctccggctgccggtacagatgcgggagaagatgctggagatgcggtttctccccggcaacttgccttgttggcatctatggtcgaagaagcagtgcgtaccattcccaccccggatccagctgcatccccaccacgaacaccagcattcagggctgatgatgacgatggtgatgaatatgatgatgcggcagatgctgcgggagatcgagcgcccgcgcgcgggcgggagagagaagctcccctgagaggggcataccccgatccaaccgataggctcagccccaggccccctgctcaaccccctagacggcgacggcatgggcgatggcgcccttcagccagttccacaagttctgattctggctcaagcagtagttcctcagccagttcaagttcttcttccagcgatgaagatgaagatgatgatggtaatgatgccgctgatcatgcccgagaagctcgtgcagtgggcaggggcccttcctcagccgccccagctgctccaggaaggaccccgccaccccctggtcccccacctctgtcagaagcagcccctaaacctagagccgctgcacggacgcctgccgcgtcagccggacgaattgaacggcggagagcacgggccgctgtcgctggaagagatgcgacaggaaggtttacagctggccaaccgagaagagtggaacttgatgcggatgccacttctggggcgttttatgctagataccgggatggatatgtttctggcgaaccatggccaggtgctggcccacctcctcccggcagagtcctttatggtggactcggggattcccgtccaggtctgtggggtgcaccggaagcagaagaagcaagacgtcgttttgaagcatccggagcaccagcagcggtatgggcaccagaactcggagatgcggcccaacaatatgcgttgataacacgactcctctatacgccagatgccgaagctatgggatggcttcaaaatcccagggtagtgccaggagatgtcgccctcgatcaagcatgttttcgcataagtggtgctgccagaaattcatcctcttttattacaggatccgtagctcgagcagtacctcatcttgggtatgcaatggcagcaggacgttttgggtggggtttagcccatgcagccgctgcagtcgctatgtctcgacggtatgatagagctcagaaaggtttcttgctcacttcactcaggcgggcatatgcaccactccttgcaagagaaaatgctgccttaaccggcgcagcaggctctccgggagcaggtgccgatgatgaaggcgtggcagcagtggctgctgctgcgcccggggaacgagcagtaccagcgggctatggagctgcaggcattttggctgctctcggccgacttagcgctgcacctgcgtctccagctggtggtgatgatcctgatgcagcgagacatgctgatgctgatgatgatgctggaagaagggctcaagctgggcgtgttgctgttgaatgtttagctgcgtgtcgaggtatactcgaagccctcgctgaagggtttgatggtgatttggccgctgtgcccggcttggcaggcgcaagaccagcttcaccgcctaggcctgaaggcccggccgggccagcctctccacccccaccacatgctgatgccccacgactcagggcctggttgcgggaattaagatttgttagggatgctttggttttgatgagattgaggggtgatctcagagttgcaggtggttctgaagcagctgtcgcagctgtaagggctgtatcattggttgcaggtgctctcggaccagcccttcccagagatcctcgattaccatcctctgcagctgcggctgcagccgatctccttttcgataatcaatcactcaggcctttgttggccgcagcagcttccgcgcctgatgcggcggatgctctcgcagctgctgcagcatcagctgctcctcgcgaaggaaggaaaaggaaatcccctggacctgctagaccccctggcgggggggggccacgcccaccaaagacaaagaaatccggggcagatgctcctggaagcgatgctagggcacctcttccagccccggctccaccatctaccccaccaggacctgaaccggctcctgcacaacctgccgcacctagggctgctgctgcccaagcaagacctagacctgttgcagtatctaggagaccagcagaagggccagatcctctcggcggatggagacgacaaccgcccggaccttcacatacagccgcacctgcagctgcagcactcgaagcatattgttctccccgagcagtcgctgaattgacagatcatcctcttttcccggtgccatggcgtcccgcgctgatgtttgatccacgcgcactcgcgagcattgctgctaggtgtgcgggcccagcaccagctgcgcaagcagcttgtggtggcggggatgatgatgacaatccacatccgcatggtgcagctggcgggcgattgttcggtccactcagagctagcggaccccttagaaggatggctgcatggatgagacaaattccagatcctgaagatgttcgggtagttgtcttgtattcacccttacccggtgaagatcttgcaggggggggcgctagcggcggaccgcccgaatggtctgcagaacggggcggtctttcttgtctccttgctgcattagctaatcgcctctgtggaccagatacagctgcttgggccggaaactggactggggcaccagatgttagtgcattgggagcgcaaggagtccttctcctcagtacaagagatttggcttttgctggtgctgtcgagttcctcggtctcttggcatccgcaggagatcgcaggcttattgtagtgaatacagttcgggcatgtgattggccggctgatggtcctgccgtctctaggcaacatgcatatctcgcttgtgaactcttacctgctgttcaatgtgcagtaaggtggcctgccgcccgtgatctccggcggactgttttagctagcggaagagtctttggaccaggcgtgtttgctcgtgtcgaagctgctcatgctcgattgtatccggatgcacccccattgaggctctgtaggggcgggaatgtaaggtatagagttaggactcggtttggaccagataccccagttccaatgtctccaagagaatatcggcgcgcggttctccccgcattggatggacgcgctgccgcatcaggcacaacggatgctatggcccctggggcccccgacttttgtgaagaagaagctcatagccatgctgcttgtgcccggtggggtctcggggctcccttacgccctgtttatgttgccctcggtcgggaagccgttcgggcaggacctgcgcgctggcggggtccccgtcgcgatttctgtgcacgagctttattggaacctgatgatgatgctccaccccttgtattaagaggtgatgatgatggacccggcgcactcccaccagcaccaccgggcatcaggtgggcatccgctacaggtcgatccgggacggttttggccgctgcaggagcggttgaagtcctcggcgctgaagcaggtctggcgacacccccaaggagagaggtcgtagattgggaaggagcatgggatgaggatgatggtggggcatttgaaggcgatggagtattaggcagtggagagggcagaggaagtctgctaacatgcggtgacgtcgaggagaatcctggcccaacgcgtaccggtatggccacagatatagacatgctgatagatcttggactcgatctgagtgattccgacctcgatgaagatccaccggaaccagccgaaagtcgtcgagatgatctcgagtcagattccaatggcgaatgctcatccagtgatgaagatatggaagatccacatggtgaagatggtcctgaacccatcctggatgcggcacggccagctgtgcggcccagtcgacctgaggatccaggagtgccaagtacgcaaaccccgaggcctactgaacgtcaagggccgaatgacccacagcccgccccacattctgtatggtcccggttgggagctagaagaccatcatgtagtccagaacgacatggcggaaaagtagctaggctgcagccaccgccaactaaggcgcaaccagctagaggcggtaggcgaggacgcaggcgaggccgaggcaggggcggacctggcgcagcagacggcctgagcgatccacgaaggagagcacctcggactaacagaaatcctggcgggccacgtcctggcgctggttggaccgatggtccgggtgcacctcacggagaagcctggcgtggctccgaacaaccagatcccccaggcggtccacgaactagatccgttaggcaggctccacccccgctcatgaccttggcaatagcaccgcccccagccgatcctcgagcacctgctcctgaacggaaagcccctgcagcggatacaattgatgcgacaacccgactggtgttgaggtctatttctgaacgggctgcagtggatcgaatatccgaatcttttgggagatctgcccaagtgatgcatgatccattcggcggacaaccattcccagctgctaacagtccatgggcaccagtcttggctggtcagggcggccctttcgatgctgaaactcggcgtgtatcttgggagacacttgtagcacatgggccatccctgtaccggaccttcgcaggaaacccgcgcgctgcttcaactgctaaagctatgagagattgtgtactcagacaggagaactttatagaagcacttgctagcgcagatgaaaccttagcttggtgtaaaatgtgtattcatcataatcttcctcttcgtccgcaagatccaataattggcacagcagctgcagttttggacaatctggctactaggttgagacctttcttgcaatgttatctcaaagccagagggctctgtggtctcgatgagctctgctcaagaagaagattggccgatatcaaagatatcgccagctttgtcttcgtgatacttgcacggcttgctaatagggtagaacgcggggtggccgaaattgattatgccacactcggggtgggagtaggggagaaaatgcacttttatcttccgggtgcgtgtatggccggattgatagagattctggatactcatcggcaagaatgctcttccagagtgtgtgaactgacagcatctcatattgtggctcccccgtatgtacatgggaagtacttctactgtaattcactcttcaccggttaagatcataatcagccataccacatttgtagaggttttacttgctttaaaaaacctcccacacctccccctgaacctgaaacataaaatgaatgcaattgttgttgttaacttgtttattgcagcttataatggttacaaataaagcaatagcatcacaaatttcacaaataaagcatttttttcactgcattctagttgtggtttgtccaaactcatcaatgtatcttatcatgtctggggtacc

SEQ ID NO: 3 - DNA, 16336 bp, synthetic construct
  source 1..16336: mol_type = other DNA
gtacccaattcgccctatagtgagtcgtattacgcgcgctcactggccgtcgttttacaacgtcgtgactgggaaaaccctggcgttacccaacttaatcgccttgcagcacatccccctttcgccagctggcgtaatagcgaagaggcccgcaccgatcgcccttcccaacagttgcgcagcctgaatggcgaatggcgcgacgcgccctgtagcggcgcattaagcgcggcgggtgtggtggttacgcgcagcgtgaccgctacacttgccagcgccctagcgcccgctcctttcgctttcttcccttcctttctcgccacgttcgccggctttccccgtcaagctctaaatcgggggctccctttagggttccgatttagtgctttacggcacctcgaccccaaaaaacttgattagggtgatggttcacgtagtgggccatcgccctgatagacggtttttcgccctttgacgttggagtccacgttctttaatagtggactcttgttccaaactggaacaacactcaaccctatctcggtctattcttttgatttataagggattttgccgatttcggcctattggttaaaaaatgagctgatttaacaaaaatttaacgcgaattttaacaaaatattaacgtttacaatttcctgatgcggtattttctccttacgcatctgtgcggtatttcacaccgcatagggtaataactgatataattaaattgaagctctaatttgtgagtttagtatacatgcatttacttataatacagttttttagttttgctggccgcatcttctcaaatatgcttcccagcctgcttttctgtaacgttcaccctctaccttagcatcccttccctttgcaaatagtcctcttccaacaataataatgtcagatcctgtagacaccacatcatccacggttctatactgttgacccaatgcatctcccttgtcatctaaacccacaccgggtgtcataatcaaccaatcgtaaccttcatctcttccacccatgtctctttgagcaataaagccgataacaaaatctttgtcgctcttcgcaatgtcaacagtacccttagtatattctccagtagatagggagcccttgcatgacaattctgctaacatcaaaaggcctctaggttcctttgttacttcttctgccgcctgcttcaaaccgctaacaatacctgggcccaccacaccgtgtgcattcgtaatgtctgcccattctgctattctgtatacacccgcagagtactgcaatttgactgtattaccaatgtcagcaaattttctgtcttcgaagagtaaaaaattgtacttggcggataatgcctttagcggcttaactgtgccctccatggaaaaatcagtcaagatatccacatgtgtttttagtaaacaaattttgggacctaatgcttcaactaactccagtaattccttggtggtacgaacatccaatgaagcacacaagtttgtttgcttttcgtgcatgatattaaatagcttggcagcaacaggactaggatgagtagcagcacgttccttatatgtagctttcgacatgatttatcttcgtttcctgcaggtttttgttctgtgcagttgggttaagaatactgggcaatttcatgtttcttcaacactacatatgcgtatatataccaatctaagtctgtgctccttccttcgttcttccttctgttcggagattaccgaatcaaaaaaatttcaaagaaaccgaaatcaaaaaaaagaataaaaaaaaaatgatgaattgaattgaaaagctgtggtatggtgcactctcagtacaatctgctctgatgccgcatagttaagccagccccgacacccgccaacacccgctgacgcgccctgacgggcttgtctgctcccggcatccgcttacagacaagctgtgacaaagggcctcgtgatacgcctatttttataggttaatgtcatgataataatggtttcttaggacggatcgcttgcctgtaacttacacgcgcctcgtatcttttaatgatggaataatttgggaatttactctgtgtttatttatttttatgttttgtatttggattttagaaagtaaataaagaaggtagaagagttacggaatgaagaaaaaaaaataaacaaaggtttaaaaaatttcaacaaaaagcgtactttacatatatatttattagacaagaaaagcagattaaatagatatacattcgattaacgataagtaaaatgtaaaatcacaggattttcgtgtgtggtcttctacacagacaagatgaaacaattcggcattaatacctgagagcaggaagagcaagataaaaggtagtatttgttggcgatccccctagagtcttttacatcttcggaaaacaaaaactattttttctttaatttctttttttactttctatttttaatttatatatttatattaaaaaatttaaattataattatttttatagcacgtgatgaaaaggacccaggtggcacttttcggggaaatgtgcgcggaacccctatttgtttatttttctaaatacattcaaatatgtatccgctcatgagacaataaccctgataaatgcttcaataatattgaaaaaggaagagtatgagtattcaacatttccgtgtcgcccttattcccttttttgcggcattttgccttcctgtttttgctcacccagaaacgctggtgaaagtaaaagatgctgaagatcagttgggtgcacgagtgggttacatcgaactggatctcaacagcggtaagatccttgagagttttcgccccgaagaacgttttccaatgatgagcacttttaaagttctgctatgtggcgcggtattatcccgtattgacgccgggcaagagcaactcggtcgccgcatacactattctcagaatgacttggttgagtactcaccagtcacagaaaagcatcttacggatggcatgacagtaagagaattatgcagtgctgccataaccatgagtgataacactgcggccaacttacttctgacaacgatcggaggaccgaaggagctaaccgcttttttgcacaacatgggggatcatgtaactcgccttgatcgttgggaaccggagctgaatgaagccataccaaacgacgagcgtgacaccacgatgcctgtagcaatggcaacaacgttgcgcaaactattaactggcgaactacttactctagcttcccggcaacaattaatagactggatggaggcggataaagttgcaggaccacttctgcgctcggcccttccggctggctggtttattgctgataaatctggagccggtgagcgtggatctcgcggtatcattgcagcactggggccagatggtaagccctcccgtatcgtagttatctacacgacggggagtcaggcaactatggatgaacgaaatagacagatcgctgagataggtgcctcactgattaagcattggtaactgtcagaccaagtttactcatatatactttagattgatttaaaacttcatttttaatttaaaaggatctaggtgaagatcctttttgataatctcatgaccaaaatcccttaacgtgagttttcgttccactgagcgtcagaccccgtagaaaagatcaaaggatcttcttgagatcctttttttctgcgcgtaatctgctgcttgcaaacaaaaaaaccaccgctaccagcggtggtttgtttgccggatcaagagctaccaactctttttccgaaggtaactggcttcagcagagcgcagataccaaatactgtccttctagtgtagccgtagttaggccaccacttcaagaactctgtagcaccgcctacatacctcgctctgctaatcctgttaccagtggctgctgccagtggcgataagtcgtgtcttaccgggttggactcaagacgatagttaccggataaggcgcagcggtcgggctgaacggggggttcgtgcacacagcccagcttggagcgaacgacctacaccgaactgagatacctacagcgtgagctatgagaaagcgccacgcttcccgaagggagaaaggcggacaggtatccggtaagcggcagggtcggaacaggagagcgcacgagggagcttccagggggaaacgcctggtatctttatagtcctgtcgggtttcgccacctctgacttgagcgtcgatttttgtgatgctcgtcaggggggcggagcctatggaaaaacgccagcaacgcggcctttttacggttcctggccttttgctggccttttgctcacatgttctttcctgcgttatcccctgattctgtggataaccgtattaccgcctttgagtgagctgataccgctcgccgcagccgaacgaccgagcgcagcgagtcagtgagcgaggaagcggaagagcgcccaatacgcaaaccgcctctccccgcgcgttggccgattcattaatgcagctggcacgacaggtttcccgactggaaagcgggcagtgagcgcaacgcaattaatgtgagttacctcactcattaggcaccccaggctttacactttatgcttccggctcctatgttgtgtggaattgtgagcggataacaatttcacacaggaaacagctatgaccatgattacgccaagcgcgcaattaaccctcactaaagggagctagcccccggcggtctctaagaaacaccgccccccctccttcataccaccgagcatgcctgggtgtgggttggtaaccaacacgcccatcccctcgtctcctgtgattctctggctgcaccgcattcttgttttctaactatgttcctgtttctgtctccccccccacccctccgccccaccccccaacacccacggatcccctcgagtttactccctatcagtgatagagaacgtatgaagagtttactccctatcagtgatagagaacgtatgcagactttactccctatcagtgatagagaacgtataaggagtttactccctatcagtgatagagaacgtatgaccagtttactccctatcagtgatagagaacgtatctacagtttactccctatcagtgatagagaacgtatatccagtttactccctatcagtgatagagaacgtataagctttgcttatgtaaaccagggcgcctataaaagagtgctgattttttgagtaaacttcaattccacaacacttttgtcttataccaactttccgtaccacttcctaccctcgtaaagaattcatggaaccaaggcctggagcttccactagacgccccgaaggaagaccacaacgggaacctgctccagacgtgtgggtattcccttgtgatcgcgatctcccagattcaagtgatagcgaagctgaaacagaggtcggtggacgcggtgatgctgatcatcacgatgatgattctgcttctgaagccgattctaccgatactgagctctttgaaacaggtttattgggacctcaaggtgtcgacggcggagcagtgtccggtggttccccgcctagagaagaggatcctgggagctgtggcggggctccaccgcgcgaagatggcggttcagatgaaggtgatgtttgtgctgtctgtaccgacgaaattgccccgcatctcagatgtgatacttttccttgtatgcatcggttttgtattccttgtatgaagacatggatgcagcttcgaaatacttgtcctctctgtaatgctaaacttgtttatctcattgtcggggttacaccatctggtagcttttcaactattcctatagtaaatgatcctcaaacaagaatggaagcagaagaagctgtgcgggcaggaactgctgtcgatttcatatggactggtaaccaaaggtttgctccaagatatttgacattgggcggtcataccgtaagagcattgtccccaactcatccagaaccgacaaccgatgaagacgatgatgatttggatgatgcggattatgtgcccccagcacctaggagaacaccaagagctcccccaagacggggagcagctgctccacctgtcactggtggcgctagtcatgctgcacctcaaccagcagccgcacgaacggccccgccaagtgcacctattggcccccatgggtcatcaaatacaaatacaacaacaaattcctctggaggaggcggatctcgacaatcacgtgcagccgtccctagaggtgccagcgggccaagcggcggcgtgggtgtggtcgaggcagaagctggaagaccaagagggcgtacagggccactggtgaatcggccggcaccactcgccaataatcgcgatcctatcgtaatttcagattctccgcctgctagtccgcatcgaccgccagcagccccaatgccgggatctgcacctagacctgggccgcctgcaagcgcagcagcaagcggaccagctcggccacgagcagcagtagctccctgcgtccgtgctcccccacctggcccagggccaagagcaccagctccaggagctgaaccagcagcaaggccagccgatgcccgtagagtcccacaatcccattccagcttggcccaagctgccaatcaggagcaaagcctttgtcgtgcccgcgctaccgtagcccgtgggagcggtggccccggagtagaaggcggtcatggcccatctcggggcgcggcgccgagcggggcagctccgtctggagctccacctctgccatctgcagcgagtgtagaacaagaagccgccgttaggcctcgaaaacgccggggctccggtcaagagaatccgagcccacaaagcacacgcccaccgctggcccccgctggagctaaacgagcagccacccatccgccatctgatagcggccctggcggtcggggtcaaggcggcccaggaacacctctcaccagctccgccgcatcagcaagctcttcatctgcgtcaagctcttcagcacccacaccagccggtgcaacatcctctgctacgggcgcagcaagctcatctgccagcgcatctagcggtggcgctgtaggggcgttgggcggcaggcaggaagagacttctctgggacctcgtgccgcaagcggtccacgcggtcctcgcaaatgcgctcgcaaaactagacatgcagaaacgagtggcgctgtgccagctggtggactgactagatatttacctattagcggcgtatcctcagttgtggcattgtccccatatgtaaataaaacaattactggagattgtttgcctattctcgatatggaaactggcaatattggcgcatatgtcgtgcttgtagatcaaactggtaatatggctacacgcctcagggctgcagtgccaggatggtctcgtcgaacattgttgcctgaaactgccggaaatcatgttaccccacctgaatatcccacagcgcctgcaagcgaatggaatagtctgtggatgacgcctgttggaaatatgctctttgatcaagggacgttagttggggcgttggattttaggtcccttcgctcccgccatccttggtctggtgaacaaggtgccagcactcgagatgaaggcaagcagtgcgtacgcggatcctctgctggagacatgagagctgccaacctttggccaagcccgctcatgatcaaacgctctaagaagaacagcctggccttgtccctgacggccgaccagatggtcagtgccttgttggatgctgagccccccatactctattccgagtatgatcctaccagacccttcagtgaagcttcgatgatgggcttactgaccaacctggcagacagggagctggttcacatgatcaactgggcgaagagggtgccaggctttgtggatttgaccctccatgatcaggtccaccttctagaatgtgcctggctagagatcctgatgattggtctcgtctggcgctccatggagcacccagtgaagctactgtttgctcctaacttgctcttggacaggaaccagggaaaatgtgtagagggcatggtggagatcttcgacatgctgctggctacatcatctcggttccgcatgatgaatctgcagggagaggagtttgtgtgcctcaaatctattattttgcttaattctggagtgtacacatttctgtccagcaccctgaagtctctggaagagaaggaccatatccaccgagtcctggacaagatcacagacactttgatccacctgatggccaaggcaggcctgaccctgcagcagcagcaccagcggctggcccagctcctcctcatcctctcccacatcaggcacatgagtaacaaaggcatggagcatctgtacagcatgaagtgcaagaacgtggtgcccctctatgacctgctgctggaggcggcggacgcccaccgcctacatgcgcccactagccgtggaggggcatccgtggaggagacggaccaaagccacttggccactgcgggctctacttcatcgcattccttgcaaaagtattacatcacgggggaggcagagggtttccctgccacagctggctcaggcgccaccaactttagcctgctgaagcaggcaggcgacgtcgaggagaaccccggccctgaattcacgcgtatggctagtgaaaataaacaacggccaggttcaccgggtcctacagatggcccaccaccaacaccatctcccgatagagatgaacgtggtgcgcttggctggggtgctgaaaccgaagaaggcggagatgatccggatcatgatccagatcatccgcatgatttagatgatgcacgtcgcgatggccgtgctccggctgccggtacagatgcgggagaagatgctggagatgcggtttctccccggcaacttgccttgttggcatctatggtcgaagaagcagtgcgtaccattcccaccccggatccagctgcatccccaccacgaacaccagcattcagggctgatgatgacgatggtgatgaatatgatgatgcggcagatgctgcgggagatcgagcgcccgcgcgcgggcgggagagagaagctcccctgagaggggcataccccgatccaaccgataggctcagccccaggccccctgctcaaccccctagacggcgacggcatgggcgatggcgcccttcagccagttccacaagttctgattctggctcaagcagtagttcctcagccagttcaagttcttcttccagcgatgaagatgaagatgatgatggtaatgatgccgctgatcatgcccgagaagctcgtgcagtgggcaggggcccttcctcagccgccccagctgctccaggaaggaccccgccaccccctggtcccccacctctgtcagaagcagcccctaaacctagagccgctgcacggacgcctgccgcgtcagccggacgaattgaacggcggagagcacgggccgctgtcgctggaagagatgcgacaggaaggtttacagctggccaaccgagaagagtggaacttgatgcggatgccacttctggggcgttttatgctagataccgggatggatatgtttctggcgaaccatggccaggtgctggcccacctcctcccggcagagtcctttatggtggactcggggattcccgtccaggtctgtggggtgcaccggaagcagaagaagcaagacgtcgttttgaagcatccggagcaccagcagcggtatgggcaccagaactcggagatgcggcccaacaatatgcgttgataacacgactcctctatacgccagatgccgaagctatgggatggcttcaaaatcccagggtagtgccaggagatgtcgccctcgatcaagcatgttttcgcataagtggtgctgccagaaattcatcctcttttattacaggatccgtagctcgagcagtacctcatcttgggtatgcaatggcagcaggacgttttgggtggggtttagcccatgcagccgctgcagtcgctatgtctcgacggtatgatagagctcagaaaggtttcttgctcacttcactcaggcgggcatatgcaccactccttgcaagagaaaatgctgccttaaccggcgcagcaggctctccgggagcaggtgccgatgatgaaggcgtggcagcagtggctgctgctgcgcccggggaacgagcagtaccagcgggctatggagctgcaggcattttggctgctctcggccgacttagcgctgcacctgcgtctccagctggtggtgatgatcctgatgcagcgagacatgctgatgctgatgatgatgctggaagaagggctcaagctgggcgtgttgctgttgaatgtttagctgcgtgtcgaggtatactcgaagccctcgctgaagggtttgatggtgatttggccgctgtgcccggcttggcaggcgcaagaccagcttcaccgcctaggcctgaaggcccggccgggccagcctctccacccccaccacatgctgatgccccacgactcagggcctggttgcgggaattaagatttgttagggatgctttggttttgatgagattgaggggtgatctcagagttgcaggtggttctgaagcagctgtcgcagctgtaagggctgtatcattggttgcaggtgctctcggaccagcccttcccagagatcctcgattaccatcctctgcagctgcggctgcagccgatctccttttcgataatcaatcactcaggcctttgttggccgcagcagcttccgcgcctgatgcggcggatgctctcgcagctgctgcagcatcagctgctcctcgcgaaggaaggaaaaggaaatcccctggacctgctagaccccctggcgggggggggccacgcccaccaaagacaaagaaatccggggcagatgctcctggaagcgatgctagggcacctcttccagccccggctccaccatctaccccaccaggacctgaaccggctcctgcacaacctgccgcacctagggctgctgctgcccaagcaagacctagacctgttgcagtatctaggagaccagcagaagggccagatcctctcggcggatggagacgacaaccgcccggaccttcacatacagccgcacctgcagctgcagcactcgaagcatattgttctccccgagcagtcgctgaattgacagatcatcctcttttcccggtgccatggcgtcccgcgctgatgtttgatccacgcgcactcgcgagcattgctgctaggtgtgcgggcccagcaccagctgcgcaagcagcttgtggtggcggggatgatgatgacaatccacatccgcatggtgcagctggcgggcgattgttcggtccactcagagctagcggaccccttagaaggatggctgcatggatgagacaaattccagatcctgaagatgttcgggtagttgtcttgtattcacccttacccggtgaagatcttgcaggggggggcgctagcggcggaccgcccgaatggtctgcagaacggggcggtctttcttgtctccttgctgcattagctaatcgcctctgtggaccagatacagctgcttgggccggaaactggactggggcaccagatgttagtgcattgggagcgcaaggagtccttctcctcagtacaagagatttggcttttgctggtgctgtcgagttcctcggtctcttggcatccgcaggagatcgcaggcttattgtagtgaatacagttcgggcatgtgattggccggctgatggtcctgccgtctctaggcaacatgcatatctcgcttgtgaactcttacctgctgttcaatgtgcagtaaggtggcctgccgcccgtgatctccggcggactgttttagctagcggaagagtctttggaccaggcgtgtttgctcgtgtcgaagctgctcatgctcgattgtatccggatgcacccccattgaggctctgtaggggcgggaatgtaaggtatagagttaggactcggtttggaccagataccccagttccaatgtctccaagagaatatcggcgcgcggttctccccgcattggatggacgcgctgccgcatcaggcacaacggatgctatggcccctggggcccccgacttttgtgaagaagaagctcatagccatgctgcttgtgcccggtggggtctcggggctcccttacgccctgtttatgttgccctcggtcgggaagccgttcgggcaggacctgcgcgctggcggggtccccgtcgcgatttctgtgcacgagctttattggaacctgatgatgatgctccaccccttgtattaagaggtgatgatgatggacccggcgcactcccaccagcaccaccgggcatcaggtgggcatccgctacaggtcgatccgggacggttttggccgctgcaggagcggttgaagtcctcggcgctgaagcaggtctggcgacacccccaaggagagaggtcgtagattgggaaggagcatgggatgaggatgatggtggggcatttgaaggcgatggagtattatgcgtacgcggatcctctgccggggatatgcgagctgcgaatctctggcctagccccttgatgattaaacggagcaagaagaactcattggcccttagccttaccgccgaccagatggtgagtgcacttttggatgcggaacctcctattttgtatagcgaatacgatcctactcggcccttttcagaagcgtccatgatgggccttctgaccaacctggcggatagggaactggttcacatgatcaattgggccaagcgagtgcctgggtttgttgatcttactctgcatgaccaggtacatcttttggagtgcgcatggctggaaatcctgatgatcggactggtctggcgctcaatggagcacccagtcaagttgctgttcgctccgaacttgcttttggataggaatcaaggtaaatgcgttgagggcatggttgagatttttgacatgctgctcgctacttctagcaggtttcgcatgatgaatctgcaaggagaggagtttgtttgtctgaaaagcattattcttctcaattcaggagtttatacattcctctcctctaccctcaagtcccttgaggagaaagaccatattcacagggtacttgataagatcacagacactctgattcatttgatggctaaagcgggacttacactgcaacagcagcaccagaggttggcgcaactccttcttatattgtctcatattagacacatgagcaataaggggatggaacatctttatagtatgaagtgcaaaaacgttgttccactttatgatctccttttggaagcagcggatgcgcatcggctccatgctcccacgagccggggtggggcaagtgtggaagaaacggatcaaagccatctggccacagccggaagtacgtctagccatagcctgcaaaaatactacattactggtgaggctgaggggttccctgcaaccgccggcagtggagagggcagaggaagtctgctaacatgcggtgacgtcgaggagaatcctggcccaacgcgtaccggtatggccacagatatagacatgctgatagatcttggactcgatctgagtgattccgacctcgatgaagatccaccggaaccagccgaaagtcgtcgagatgatctcgagtcagattccaatggcgaatgctcatccagtgatgaagatatggaagatccacatggtgaagatggtcctgaacccatcctggatgcggcacggccagctgtgcggcccagtcgacctgaggatccaggagtgccaagtacgcaaaccccgaggcctactgaacgtcaagggccgaatgacccacagcccgccccacattctgtatggtcccggttgggagctagaagaccatcatgtagtccagaacgacatggcggaaaagtagctaggctgcagccaccgccaactaaggcgcaaccagctagaggcggtaggcgaggacgcaggcgaggccgaggcaggggcggacctggcgcagcagacggcctgagcgatccacgaaggagagcacctcggactaacagaaatcctggcgggccacgtcctggcgctggttggaccgatggtccgggtgcacctcacggagaagcctggcgtggctccgaacaaccagatcccccaggcggtccacgaactagatccgttaggcaggctccacccccgctcatgaccttggcaatagcaccgcccccagccgatcctcgagcacctgctcctgaacggaaagcccctgcagcggatacaattgatgcgacaacccgactggtgttgaggtctatttctgaacgggctgcagtggatcgaatatccgaatcttttgggagatctgcccaagtgatgcatgatccattcggcggacaaccattcccagctgctaacagtccatgggcaccagtcttggctggtcagggcggccctttcgatgctgaaactcggcgtgtatcttgggagacacttgtagcacatgggccatccctgtaccggaccttcgcaggaaacccgcgcgctgcttcaactgctaaagctatgagagattgtgtactcagacaggagaactttatagaagcacttgctagcgcagatgaaaccttagcttggtgtaaaatgtgtattcatcataatcttcctcttcgtccgcaagatccaataattggcacagcagctgcagttttggacaatctggctactaggttgagacctttcttgcaatgttatctcaaagccagagggctctgtggtctcgatgagctctgctcaagaagaagattggccgatatcaaagatatcgccagctttgtcttcgtgatacttgcacggcttgctaatagggtagaacgcggggtggccgaaattgattatgccacactcggggtgggagtaggggagaaaatgcacttttatcttccgggtgcgtgtatggccggattgatagagattctggatactcatcggcaagaatgctcttccagagtgtgtgaactgacagcatctcatattgtggctcccccgtatgtacatgggaagtacttctactgtaattcactcttctgcgtacgcggatcctctgcgggcgacatgagggctgcaaacctgtggccttcccctctcatgataaaacggagcaagaaaaacagtctggcgctgagtctgacagcagatcagatggttagcgcccttctggacgccgaacccccgatactttattctgagtacgaccccacccggcctttttctgaggcctccatgatgggactgttgactaaccttgcggacagggagttggtgcacatgataaattgggctaagcgcgtacccggatttgtcgatctgacgttgcatgatcaagtgcacctcctggagtgcgcgtggttggaaatactgatgataggattggtatggagaagtatggagcatcctgttaaactcctctttgcgccaaacctgttgctggatcggaatcagggcaaatgtgtagagggaatggtggaaatcttcgacatgcttcttgcgacgtcaagtaggttccgcatgatgaatctgcagggtgaagaatttgtctgtttgaaatccattattttgcttaactcaggtgtgtacacttttttgtcctcaacccttaaatctcttgaggagaaagaccacatccatagggttctcgacaagatcacggatacactcatccatctgatggcgaaggcgggactgactttgcagcaacaacatcagcgactcgcccaactcttgcttatactcagccatatcaggcatatgtctaacaaaggtatggagcatctctattcaatgaaatgtaaaaacgtagttcctctttacgacttgttgctggaagccgctgacgcgcatcggcttcacgcgcccacgagtagaggcggcgcgagcgtcgaggagactgaccaaagccaccttgcgactgcaggcagtacttcatcccacagcttgcaaaaatactatataactggtgaggcggagggctttcctgctacagctaccggttaagatcataatcagccataccacatttgtagaggttttacttgctttaaaaaacctcccacacctccccctgaacctgaaacataaaatgaatgcaattgttgttgttaacttgtttattgcagcttataatggttacaaataaagcaatagcatcacaaatttcacaaataaagcatttttttcactgcattctagttgtggtttgtccaaactcatcaatgtatcttatcatgtctggg

SEQ ID NO: 4 - DNA, 9778 bp, synthetic construct
  source 1..9778: mol_type = other DNA
agcgcgcgtaatacgactcactatagggcgaattgggtacgagaccaaccttggtctcgatcctgaaattaacgccgacgggaggggcttaatccgcagcctggagatccagccccctcaacccgggaggtggtccctgcagttacgccaatgataacccccgccagaaaaatcttagtagccttccctttttgttttccgtgccccaactcggcggattgactcggccccttccggaaacacccgaatcaacttctagtcaaattattgttcacgccgcaatgacccacccctggcccgcgtctgtggaactgacccctggtgtacaggagagttcgctgctgaaagtggtcccaaaggggtactagtttttaagctcccaactccccctcccccagcgtctggaggattccacaccctcgcaccgcaggggcgaggaagtgggcggagtccggttttggcgccagccgctgaggctgccaagcagaaaagccaccgctgaggagactccggtcactgtcctcgccccgcctcccccttccctccccttggggaccaccgggcgccacgccgcgaacggtaagtgccgcggtcgtcggcgcctccgccctccccctagggccccaattcccagcgggcgcggcgcgcggcccctccccccgccgggcgcgcgcccgctgccccgcccttcgtggccgcccggcgtgggcggtgccacccctccccccggcggccccgcgcgcagctcccggctccctcccccttcggatgtggcttgagctgtaggcgcggagggccggagacgctgcagacccgcgacccggagcagctcggaggcggtgaagtcggtggctttccttctctctagctctcgctcgctggtggtgcttcagatgccacacgcgtcccgggggcccggttctccgctcccctcggctccggtgcccgtcagtgggcagagcgcacatcgcccacagtccccgagaagttggggggaggggtcggcaattgaaccggtgcctagagaaggtggcgcggggtaaactgggaaagtgatgtcgtgtactggctccgcctttttcccgagggtgggggagaaccgtatataagtgcagtagtcgccgtgaacgttctttttcgcaacgggtttgccgccagaacacaggtaagtgccgtgtgtggttcccgcgggcctggcctctttacgggttatggcccttgcgtgccttgaattacttccacctggctgcagtacgtgattcttgatcccgagcttcgggttggaagtgggtgggagagttcgaggccttgcgcttaaggagccccttcgcctcgtgcatgagttgaggcctggcctgggcgctggggccgccgcgtgcgaatctggtggcaccttcgcgcctgtctcgctgctttcgataagtctctagccatttaaaatttttgatgacctgctgcgacgctttttttctggcaagatagtcttgtaaatgcgggccaagatctgcacactggtatttcggtttttggggccgcgggcggcgacggggcccgtgcgtcccagcgcacatgttcggcgaggcggggcctgcgagcgcggccaccgagaatcggacgggggtagtctcaagctggccggcctgctctggtgcctggcctcgcgccgccgtgtatcgccccgccctgggcggcaaggctggcccggtcggcaccagttgcgtgagcggaaagatggccgcttcccggccctgctgcagggagctcaaaatggaggacgcggcgctcgggagagcgggcgggtgagtcacccacacaaaggaaaagggcctttccgtcctcagccgtcgcttcatgtgactccacggagtaccgggcgccgtccaggcacctcgattagttctcgagcttttggagtacgtcgtctttaggttggggggaggggttttatgcgatggagtttccccacactgagtgggtggagactgaagttaggccagcttggcacttgatgtaattctccttggaatttgccctttttgagtttggatcttggttcattctcaagcctcagacagtggttcaaagtttttttcttccatttcaggtgtcgtgagccaccatgggatctagactggacaagagcaaagtcataaactctgctctggaattactcaatggagtcggtatcgaaggcctgacgacaaggaaactcgctcaaaagctgggagttgagcagcctaccctgtactggcacgtgaagaacaagcgggccctgctcgatgccctgccaatcgagatgctggacaggcatcatacccactcctgccccctggaaggcgagtcatggcaagactttctgcggaacaacgccaagtcataccgctgtgctctcctctcacatcgcgacggggctaaagtgcatctcggcacccgcccaacagagaaacagtacgaaaccctggaaaatcagctcgcgttcctgtgtcagcaaggcttctccctggagaacgcactgtacgctctgtccgccgtgggccactttacactgggctgcgtattggaggaacaggagcatcaagtagcaaaagaggaaagagagacacctaccaccgattctatgcccccacttctgaaacaagcaattgagctgttcgaccggcagggagccgaacctgccttccttttcggcctggaactaatcatatgtggcctggagaaacagctaaagtgcgaaagcggcgggccgaccgacgcccttgacgattttgacttagacatgctcccagccgatgcccttgacgactttgaccttgatatgctgcctgctgacgctcttgacgattttgaccttgacatgctccccgggggctcaggcgccaccaactttagcctgctgaagcaggcaggcgacgtcgaggagaaccccggccctcggaagttcctatactctagaaagaataggaacttcataacttcgtatagcatacattatacgaagttatatatgaaaaagcctgaactcaccgcgacgtctgtcgagaagtttctgatcgaaaagttcgacagcgtctccgacctgatgcagctctcggagggcgaagaatctcgtgctttcagcttcgatgtaggagggcgtggatatgtcctgcgggtaaatagctgcgccgatggtttctacaaagatcgttatgtttatcggcactttgcatcggccgcgctcccgattccggaagtgcttgacattggggaattcagcgagagcctgacctattgcatctcccgccgtgcacagggtgtcacgttgcaagacctgcctgaaaccgaactgcccgctgttctgcagccggtcgcggaggccatggatgcgatcgctgcggccgatcttagccagacgagcgggttcggcccattcggaccgcaaggaatcggtcaatacactacatggcgtgatttcatatgcgcgattgctgatccccatgtgtatcactggcaaactgtgatggacgacaccgtcagtgcgtccgtcgcgcaggctctcgatgagctgatgctttgggccgaggactgccccgaagtccggcacctcgtgcacgcggatttcggctccaacaatgtcctgacggacaatggccgcataacagcggtcattgactggagcgaggcgatgttcggggattcccaatacgaggtcgccaacatcttcttctggaggccgtggttggcttgtatggagcagcagacgcgctacttcgagcggaggcatccggagcttgcaggatcgccgcggctccgggcgtatatgctccgcattggtcttgaccaactctatcagagcttggttgacggcaatttcgatgatgcagcttgggcgcagggtcgatgcgacgcaatcgtccgatccggagccgggactgtcgggcgtacacaaatcgcccgcagaagcgcggccgtctggaccgatggctgtgtagaagtactcgccgatagtggaaaccgacgccccagcactcgtccggatcgggagatgggggaggctaacggcagtggagagggcagaggaagtctgctaacatgcggtgacgtcgaggagaatcctggcccagtgagcaagggcgaggcagtgatcaaggagttcatgcggttcaaggtgcacatggagggctccatgaacggccacgagttcgagatcgagggcgagggcgagggccgcccctacgagggcacccagaccgccaagctgaaggtgaccaagggtggccccctgcccttctcctgggacatcctgtcccctcagttcatgtacggctccagggccttcaccaagcaccccgccgacatccccgactactataagcagtccttccccgagggcttcaagtgggagcgcgtgatgaacttcgaggacggcggcgccgtgaccgtgacccaggacacctccctggaggacggcaccctgatctacaaggtgaagctccgcggcaccaacttccctcctgacggccccgtaatgcagaagaaaacaatgggctgggaagcgtccaccgagcggttgtaccccgaggacggcgtgctgaagggcgacattaagatggccctgcgcctgaaggacggcggccgctacctggcggacttcaagaccacctacaaggccaagaagcccgtgcagatgcccggcgcctacaacgttgaccgcaagttggacatcacctcccacaacgaggactacaccgtggtggaacagtacgaacgctccgagggccgccactccaccggcggcatggacgagctgtacaagtgacctcgactgtgccttctagttgccagccatctgttgtttgcccctcccccgtgccttccttgaccctggaaggtgccactcccactgtcctttcctaataaaatgaggaaattgcatcgcattgtctgagtaggtgtcattctattctggggggtggggtggggcaggacagcaagggggaggattgggaagacaatagcaggcatgctggggatgcggtgggctctatggcatgcacaacttcgtatagaaaggtatatacgaagttgtagagaccaacctggtctcagctagctccctttagtgagggttaattgcgcgcttggcgtaatcatggtcatagctgtttcctgtgtgaaattgttatccgctcacaattccacacaacataggagccggaagcataaagtgtaaagcctggggtgcctaatgagtgaggtaactcacattaattgcgttgcgctcactgcccgctttccagtcgggaaacctgtcgtgccagctgcattaatgaatcggccaacgcgcggggagaggcggtttgcgtattgggcgctcttccgcttcctcgctcactgactcgctgcgctcggtcgttcggctgcggcgagcggtatcagctcactcaaaggcggtaatacggttatccacagaatcaggggataacgcaggaaagaacatgtgagcaaaaggccagcaaaaggccaggaaccgtaaaaaggccgcgttgctggcgtttttccataggctccgcccccctgacgagcatcacaaaaatcgacgctcaagtcagaggtggcgaaacccgacaggactataaagataccaggcgtttccccctggaagctccctcgtgcgctctcctgttccgaccctgccgcttaccggatacctgtccgcctttctcccttcgggaagcgtggcgctttctcatagctcacgctgtaggtatctcagttcggtgtaggtcgttcgctccaagctgggctgtgtgcacgaaccccccgttcagcccgaccgctgcgccttatccggtaactatcgtcttgagtccaacccggtaagacacgacttatcgccactggcagcagccactggtaacaggattagcagagcgaggtatgtaggcggtgctacagagttcttgaagtggtggcctaactacggctacactagaaggacagtatttggtatctgcgctctgctgaagccagttaccttcggaaaaagagttggtagctcttgatccggcaaacaaaccaccgctggtagcggtggtttttttgtttgcaagcagcagattacgcgcagaaaaaaaggatctcaagaagatcctttgatcttttctacggggtctgacgctcagtggaacgaaaactcacgttaagggattttggtcatgagattatcaaaaaggatcttcacctagatccttttaaattaaaaatgaagttttaaatcaatctaaagtatatatgagtaaacttggtctgacagttaccaatgcttaatcagtgaggcacctatctcagcgatctgtctatttcgttcatccatagttgcctgactccccgtcgtgtagataactacgatacgggagggcttaccatctggccccagtgctgcaatgataccgcgagatccacgctcaccggctccagatttatcagcaataaaccagccagccggaagggccgagcgcagaagtggtcctgcaactttatccgcctccatccagtctattaattgttgccgggaagctagagtaagtagttcgccagttaatagtttgcgcaacgttgttgccattgctacaggcatcgtggtgtcacgctcgtcgtttggtatggcttcattcagctccggttcccaacgatcaaggcgagttacatgatcccccatgttgtgcaaaaaagcggttagctccttcggtcctccgatcgttgtcagaagtaagttggccgcagtgttatcactcatggttatggcagcactgcataattctcttactgtcatgccatccgtaagatgcttttctgtgactggtgagtactcaaccaagtcattctgagaatagtgtatgcggcgaccgagttgctcttgcccggcgtcaatacgggataataccgcgccacatagcagaactttaaaagtgctcatcattggaaaacgttcttcggggcgaaaactctcaaggatcttaccgctgttgagatccagttcgatgtaacccactcgtgcacccaactgatcttcagcatcttttactttcaccagcgtttctgggtgagcaaaaacaggaaggcaaaatgccgcaaaaaagggaataagggcgacacggaaatgttgaatactcatactcttcctttttcaatattattgaagcatttatcagggttattgtctcatgagcggatacatatttgaatgtatttagaaaaataaacaaataggggttccgcgcacatttccccgaaaagtgccacctgggtccttttcatcacgtgctataaaaataattataatttaaattttttaatataaatatataaattaaaaatagaaagtaaaaaaagaaattaaagaaaaaatagtttttgttttccgaagatgtaaaagactctagggggatcgccaacaaatactaccttttatcttgctcttcctgctctcaggtattaatgccgaattgtttcatcttgtctgtgtagaagaccacacacgaaaatcctgtgattttacattttacttatcgttaatcgaatgtatatctatttaatctgcttttcttgtctaataaatatatatgtaaagtacgctttttgttgaaattttttaaacctttgtttatttttttttcttcattccgtaactcttctaccttctttatttactttctaaaatccaaatacaaaacataaaaataaataaacacagagtaaattcccaaattattccatcattaaaagatacgaggcgcgtgtaagttacaggcaagcgatccgtcctaagaaaccattattatcatgacattaacctataaaaataggcgtatcacgaggccctttgtcacagcttgtctgtaagcggatgccgggagcagacaagcccgtcagggcgcgtcagcgggtgttggcgggtgtcggggctggcttaactatgcggcatcagagcagattgtactgagagtgcaccataccacagcttttcaattcaattcatcattttttttttattcttttttttgatttcggtttctttgaaatttttttgattcggtaatctccgaacagaaggaagaacgaaggaaggagcacagacttagattggtatatatacgcatatgtagtgttgaagaaacatgaaattgcccagtattcttaacccaactgcacagaacaaaaacctgcaggaaacgaagataaatcatgtcgaaagctacatataaggaacgtgctgctactcatcctagtcctgttgctgccaagctatttaatatcatgcacgaaaagcaaacaaacttgtgtgcttcattggatgttcgtaccaccaaggaattactggagttagttgaagcattaggtcccaaaatttgtttactaaaaacacatgtggatatcttgactgatttttccatggagggcacagttaagccgctaaaggcattatccgccaagtacaattttttactcttcgaagacagaaaatttgctgacattggtaatacagtcaaattgcagtactctgcgggtgtatacagaatagcagaatgggcagacattacgaatgcacacggtgtggtgggcccaggtattgttagcggtttgaagcaggcggcagaagaagtaacaaaggaacctagaggccttttgatgttagcagaattgtcatgcaagggctccctatctactggagaatatactaagggtactgttgacattgcgaagagcgacaaagattttgttatcggctttattgctcaaagagacatgggtggaagagatgaaggttacgattggttgattatgacacccggtgtgggtttagatgacaagggagatgcattgggtcaacagtatagaaccgtggatgatgtggtgtctacaggatctgacattattattgttggaagaggactatttgcaaagggaagggatgctaaggtagagggtgaacgttacagaaaagcaggctgggaagcatatttgagaagatgcggccagcaaaactaaaaaactgtattataagtaaatgcatgtatactaaactcacaaattagagcttcaatttaattatatcagttattaccctatgcggtgtgaaataccgcacagatgcgtaaggagaaaataccgcatcaggaaattgtaaacgttaatattttgttaaaattcgcgttaaatttttgttaaatcagctcattttttaaccaataggccgaaatcggcaaaatcccttataaatcaaaagaatagaccgagatagggttgagtgttgttccagtttggaacaagagtccactattaaagaacgtggactccaacgtcaaagggcgaaaaaccgtctatcagggcgatggcccactacgtgaaccatcaccctaatcaagttttttggggtcgaggtgccgtaaagcactaaatcggaaccctaaagggagcccccgatttagagcttgacggggaaagccggcgaacgtggcgagaaaggaagggaagaaagcgaaaggagcgggcgctagggcgctggcaagtgtagcggtcacgctgcgcgtaaccaccacacccgccgcgcttaatgcgccgctacagggcgcgtcgcgccattcgccattcaggctgcgcaactgttgggaagggcgatcggtgcgggcctcttcgctattacgccagctggcgaaagggggatgtgctgcaaggcgattaagttgggtaacgccagggttttcccagtcacgacgttgtaaaacgacggccagtg

SEQ ID NO: 5 - DNA, 107759 bp, synthetic construct
  source 1..107759: mol_type = other DNA
cattcttaaggaacttgaaaagccagcaccctgatgcgacctcgttttagtctacgtttatctgtctttacttaatgtcctttgttacaggccagaaagcataactggcctgaatattctctctgggcccactgttccacttgtatcgtcggtctgataatcagactgggaccacggtcccactcgtatcgtcggtctgattattagtctgggaccacggtcccactcgtatcgtcggtctgattattagtctgggaccacggtcccactcgtatcgtcggtctgataatcagactgggaccacggtcccactcgtatcgtcggtctgattattagtctgggaccatggtcccactcgtatcgtcggtctgattattagtctgggaccacggtcccactcgtatcgtcggtctgattattagtctggaaccacggtcccactcgtatcgtcggtctgattattagtctgggaccacggtcccactcgtatcgtcggtctgattattagtctgggaccacgatcccactcgtgttgtcggtctgattatcggtctgggaccacggtcccacttgtattgtcgatcagactatcagcgtgagactacgattccatcaatgcctgtcaagggcaagtattgacatgtcgtcgtaacctgtagaacggagtaacctcggtgtgcggttgtatgcctgcggtggattgctgctgtgtcctgcttatccacaacattttgcgcacggttatgtggacgggcctatacatgtgtatatatgtatacctatgaatgtcagtaagtatgtatacgaacagtatgatactgaagatgacaaggtaatgcatcattctatacgtgtcattctgaacgaggcgcgctttccttttttctttttgctttttctttttttttctcttgaactcgacggatctatgcggtgtgaaataccgcacagatgcgtataacttcgtatagcatacattatacgaagttattaatggcaaaactcacatccgctgtaccagtattgactgcaagagatgtggcaggtgcagtggaattttggacagatagactgggcttttcacgtgattttgtcgaagatgattttgcgggagtcgtgagggatgatgtcacacttttcatttctgctgtacaagatcaagttgttcccgataatacacttgcgtgggtttgggtcagaggactcgatgaactttatgcagaatggagcgaagtggtctcaacaaattttcgtgatgcgtctggtccagcaatgacagaaattggtgaacaaccctggggtagggaatttgcgctcagggatccagcggggaattgtgttcattttgtcgcagaagaacaagatggctcaggcgccaccaactttagcctgctgaagcaggcaggcgacgtcgaggagaaccccggccctatggtgagcaagggcgaggagctgttcaccggggtggtgcccatcctggtcgagctggacggcgacgtaaacggccacaagttcagcgtgtccggcgagggcgagggcgatgccacctacggcaagctgaccctgaagttcatctgcaccaccggcaagctgcccgtgccctggcccaccctcgtgaccaccttcggctacggcctgaagtgcttcgcccgctaccccgaccacatgaagcagcacgacttcttcaagtccgccatgcccgaaggctacgtccaggagcgcaccatcttcttcaaggacgacggcaactacaagacccgcgccgaggtgaagttcgagggcgacaccctggtgaaccgcatcgagctgaagggcatcgacttcaaggaggacggcaacatcctggggcacaagctggagtacaactacaacagccacaacgtctatatcatggccgacaagcagaagaacggcatcaaggtgaacttcaagatccgccacaacatcgaggacggcagcgtgcagctcgccgaccactaccagcagaacacccccatcggcgacggccccgtgctgctgcccgacaaccactacctgagctaccagtccgccctgagcaaagaccccaacgagaagcgcgatcacatggtcctgctggagttcgtgaccgccgccgggatcactctcggcatggacgagctgtacaagtgaagttcctatactctagaaagaataggaacttctaagatcataatcagccataccacatttgtagaggttttacttgctttaaaaaacctcccacacctccccctgaacctgaaacataaaatgaatgcaattgttgttgttaacttgtttattgcagcttataatggttacaaataaagcaatagcatcacaaatttcacaaataaagcatttttttcactgcattctagttgtggtttgtccaaactcatcaatgtatcttatcatgtctggagagaccataacttcgtataggatactttatacgaagttataacctggtctcagctaggaaaccagtacaaaggcaacatcctcacttgggtgaacggaaacgcagtattatggttactttttggatacgtgaaacatatcccatggtagtccttagacttgggagtctatcacccctagggcccatatctggaaatagacgccaggttgaatccgtatttggaggtacgatggaacagtctgggtgggacgtgcttcttaattaagggctagggggcttgcggaaacagaagacgtgtgggataaaagaatcgcactaccccaaggaagggcggggcggtttattacagagccagtcccttgagcggggatgcgtcatagacgagatactgcgcgaagtgggtctcccgcgcgtgggcttccccgttgcgggcgctgcggaggagggcggggtcgctggcgcaggtgagcgggtaggcctcctgaaacaggccacacgggtcctccacgagttcgcggcaccccggggggcgcttaaactgtacgtcgctggcggcggtggccgtggacaccgccgaacccgtctccacgatcaggcgctccaggcagcgatgtttggcggcgatgtcggccgacgtaaagaacttaaagcaggggctgagcaccggcgaggccccgttgaggtggtaggccccgttatagagcaggtccccgtacgaaaatcgctgcgacgcccacgggttggccgtggccgcgaaggcccgggacgggtcgctctggccgtggtcgtacatgagggcggtgacatccccctccttgtcccccgcgtaaacgcccccggcggcgcgtccccgggggttgcagggccggcggaagtagttgacgtcggtcgacacgggggtggcgataaactcacacacggcgtcctggccgtggtccatccctgcgcgccgcggcacctgggcgcacccgaacacggggacgggctgggccggccccaggcggtttcccgccacgaccgcgttccgcaggtacacggctgccgcgttgtccagtagagggggagccccgcggcccaggtaaaagttttggggaaggttgcccatgtcggtgacggggttgcggacggttgccgtggccacgacggcggtgtagcccacgcccaggtccacgttcccgcgcggctgggtgagcgtgaagtttacccccccgccagtttcatgccgggccacctggagctggcccaggaagtacgcctccgacgcgcgctccgagaacagcacgttctcagtcacaaagcggtcctgtcggacgacggtgaacccaaacccgggatggaggcccgtcttgagctgatgatgcaaggccacgggactgatcttgaagtaccccgccatgagcgcgtaggtcagcgcgttctccccggccgcgctctcgcggacgtgctgcacgacgggctgtcggatcgacgaaaagtagttggcccccagagccggggggaccagggggacctgccgcgacaggtcgcgcagggccggggggaaattgggcgcgttcgccacgtggtcggccccggcgaacagcgcgtggacggggagggggtaaaaatagtcgccattttggatggtatggtccagatgctggggggccatcagcaggattccggcgtgcaacgccccgtcgaatatgcgcatgttggtggtggacgcggtgttggcgcccgcgtcgggcgccgccgagcagagcagcgccgttgtgcgttcggccatgttgtgggccagcacctgcagcgtgagcatggcgggcccgtccactaccacgcgcccgttgtgaaacatggcgttgaccgtgttggccaccagattggccgggtgcagggggtgcgcggggtccgtcacggggtcgctggggcaatcctcgccgggggtgatctccgggaccaccatgttctgcagggtggcgtatacgcggtcgaagcgaacccccgcggtgcagcagcggccccgcgagaaggcgggcaccatcacgtagtagtaaatcttgtggtgcacggtccagtccgccccccggtgcggccggtcgtccgcggcgtccgcggctcgggcctgggtgttgtgcagcagctggccgtcgttgcggttgaagtccgcggtcgccacgttacacgccgctgcgtacacggggtcgtggccccccgcgctaacccggcagtcgcgatggcggtccagggccgcgcgccgcatcagggcgtcgcagtcccacacgaggggtggcagcagcgccgggtctcgcattaggtgattcagttcggcttgcgcctgcccgcccagttccgggccggtcagggtaaagtcatcaaccagctgggccagggcctcgacgtgcgccaccaggtcccggtacacggccatgcactcctcgggaaggtctcccccgaggtaggtcacgacgtacgagaccagcgagtagtcgttcacgaacgccgcgcaccgcgtgttgttccagtagctggtgatgcactggaccacgagccgggccagggcgcagaagacgtgctcgctgccgtgtatggcggcctgcagcaggtaaaacaccgccgggtagttgcggtcttcgaacgccccgcgaacggcggcgatggtggcgggggccatggcgtggcgtcccacccccagctccaggccccgggcgtcccggaacgccgccggacatagcgccaggggcaagttgccgttcaccacgcgccaggtggcctggatctcccccgggccggccgggggaacgtccccccccggcagctccacgtcggccacccccacgaagaagtcgaacgcggggtgcagctcaagagccaggttggcgttgtcgggctgcataaactgctccggggtcatctggccttccgcgacccatcggacccgcccgtgggccaggcgctgcccccaggcgttcaaaaacagctgctgcatgtctgcggcggggccggccggggccgccacgtacgccccgtacggattggcggcttcgacggggtcgcggttaaggcccccgaccgccgcgtcaacgttcatcagcgaagggtggcacacggtcccgatcgcgtgttccagagacaggcgcagcacctggcggtccttcccccaaaaaaacagctggcggggcgggaaggcgcggggatccgggtggccgggggcggggactaggtccccggcgtgcgcggcaaaccgttccatgaccggattgaacaggcccaggggcaggacgaacgtcaggtccatggcgcccaccagggggtagggaacgttggtggcggcgtagatgcgcttctccagggcctccaaaaagatcagcttctcgccgatggacaccagatccgcgcgcacgcgcgtcgtctggggggcgctctcgagctcgtccagcgtctgccggttcaggtcgagctgctcctcctgcatctccagcaggtggcggcccacgtcgtccagacttcgcacggccttgcccatcacgagcgccgtgaccaggttggccccgttcaggaccatctcgccgtacgtcaccggcacgtcggcttcggtgtcctccactttcaggaaggactgcaggaggcgctgtttgatcggggcggtggtgacgagcaccccgtcgaccggacgcccgcgcgtgtcggcatgcgtcagacggggcacggccacggagggctgcgtggccgtggtgaggtccacgagccaggcctcgacggcctcccggcggtggcccgccttgcccaggaaaaagctcgtctcgcagaagcttcgctttagctcggcgaccagggtcgcccgggccaccctggtggccaggcggccgttgtccaggtatcgttgcatcggcaacaacaaagccaggggcggcgccttttccagcagcacgtgcagcatctggtcggccgtgccgcgctcaaacgccccgaggacggcctggacgttgcgagcgagctgttggatggcgcgcaactggcgatgcgcgctgatacccgtcccgtccagggcctcccccgtgagcagggcgatggcctcggtggccaggctgaaggcggcgttcagggcccggcggtcgataatcttggtcatgtaattgtgtgtgggttgctcgatggggtgcgggccgtcgcgggcaatcagcggctggtggacctcgaactgtacgcgcccctcgttcatgtaggccagctccggaaacttggtacacacgcacgccaccgacaacccgagctccagaaagcgcacgagcgacagggtgttgcaatacgaccccaacagggcgtcgaactcgacgtcatacaggctgtttgcatcggagcgcacgcgggaaaaaaaatcgaacaggcgtcgatgcgacgccacctcgatcgtgctaaggagggacccggtcggcaccatggccgcggcataccggtatcccggagggtcgcggttgggagcggccatggggtcgcgtggagatcggctgtctctagcgatattggcccggggaggctaagatccaccccaacgcccggccacccgtgtacgtgcccgacggcccaaggtccaccgaaagacacgacgggcccggacccaaaaaggcgggggatgctgtgtgagaggccgggtgtcggtcgggggggaaaggcaccgggagaaggctgcggcctcgttccaggagaacccagtgtccccaacagacccggggacgtgggatcccaggccttatataccccccccgccccacccccgttagaacgcgacgggtgcattcaagatggccctggtccaaaagcgtgccaggaagaaattggcagaggcggcaaagctgtccgccgccgccacccacatcgaggccccggccgcgcaggctatccccagggcccgtgtgcgcaggggatcggtgggcggcagcatttggttggtggcgataaagtggaaaagcccgtccggactgaaggtctcgtgggcggcggcgaacaaggcacacagggccgtgcctcccaaaaacacggacatcccccaaaacacgggcgccgacaacggcagacgatccctcttgatgttaacgtacaggaggagcgcccgcaccgcccacgtaacgtagtagccgacgatggcggccaggatacaggccggcgccaccacccttccggtcagcccgtaatacatgcccgctgccaccatctccaacggcttcaggaccaaaaacgaccaaaggaacagaatcacgcgctttgaaaagaccggctgggtatggggcggaagacgcgagtatgccgaactgacaaaaaagtcagaggtgccgtacgaggacaatgaaaactgttcctccagtggcagttctccctcctcccccccaaaggcggcctcgtcgaccagatctcgatccaccagaggaaggtcatcccgcatggtcatggggtgtgcggtggaggtggggagaccgaaaccgcaaagggtcgcttacgtcagcaggatcccgagatcaaagacacccgggttcttgcacaaacaccacccgggttgcatccgcggaggcgagtgttttgataaggccgttccgcgccttgatataacctttgatgttgaccacaaaacccggaatttacgcctacgccccaatgcccacgcaagatgaggtaggtaaccccccccccgtgggtgtgacgttgcgtttagttcattggaggccaaggggaaaatggggtggggaggaaacggaaaacccagtaggccgtgttgggaacacgcccggggttgtcctcaaaaggcagggtccatactacggaagccgtcgttgtattcgagacctgcctgtgcgacgcacgtcggggttgcctgtgtccggttcggccccaccgcgtgcggcacgcacgaggacgagtccgcgtgctttattggcgttccaagcgttgccctccagtttctgttgtcggtgttcccccatacccacgcccacatccaccgtagggggcctctgggccgtgtcacgtcgccgcccgcgatggagcttagctacgccaccaccatgcactaccgggacgttgtgttttacgtcacaacggaccgaaaccgggcctactttgtgtgcggggggtgtgtttattccgtggggcggccgtgtgcctcgcagcccggggagattgccaagtttggtctggtcgttcgagggacaggcccagacgaccgcgtggtcgccaactatgtacgaagcgagctccgacaacgcggcctgcaggacgtgcgtcccattggggaggacgaggtgtttctggacagcgtgtgtcttctaaacccgaacgtgagctccgagctggatgtgattaacacgaacgacgtggaagtgctggacgaatgtctggccgagtactgcacctcgctgcgaaccagcccgggtgtgctaatatccgggctgcgcgtgcgggcgcaggacagaatcatcgagttgtttgaacacccaacgatagtcaacgtttcctcgcactttgtgtataccccgtccccatacgtgttcgccctggcccaggcgcacctcccccggctcccgagctcgctggaggccctggtgagcggcctgtttgacggcatccccgccccacgccagccacttgacgcccacaacccgcgcacggatgtggttatcacgggccgccgcgccccacgacccatcgccgggtcgggggcggggtcggggggcgcgggcgccaagcgggccaccgtcagcgagttcgtgcaagtcaaacacattgaccgcgtgggccccgctggcgtttcgccggcgcctccgccaaacaacaccgactcaagttccctggtgcccggggcccaggattccgccccgcccggccccacgctaagggagctgtggtgggtgttttatgccgcagaccgggcgctggaggagccccgcgccgactctggcctcacccgcgaggaggtacgtgccgtacgtgggttccgggagcaggcgtggaaactgtttggctccgcgggggccccgcgggcgtttatcggggccgcgttgggcctgagccccctccaaaagctagccgtttactactatatcatccaccgagagaggcgcctgtcccccttccccgcgctagtccggctcgtaggccggtacacacagcgccacggcctgtacgtccctcggcccgacgacccagtcttggccgatgccatcaacgggctgtttcgcgacgcgctggcggccggaaccacagccgagcagctcctcatgttcgaccttctccccccaaaggacgtgccggtgggaagcgacgtgcaggccgacagcaccgctctgctgcgctttatagaatcgcaacgtctcgccgtccccgggggggtgatctcccccgagcacgtcgcgtaccttggtgcgttcctgagcgtgctgtacgctggccgcgggcgcatgtccgcagccacgcacaccgcgcggctgacaggggtgacctccctggtgctagcggtgggtgacgtggaccgtctttccgcgtttgaccgcggagcggcgggcgcggccagccgcacgcgggccgccgggtacctggatgtgcttcttaccgttcgtctcgctcgctcccaacacggacagtctgtgtaacagaccccaataaacgtatgtcgctaccacacccttgtgtgtcaatggacgcctctccgggggggaagggaaaacaaagaggggctgggggagcggcaccaccggggcctgaacaaacaaaccacagacacggttacagtttattcggtcgggcggagaaacggccgaagccacgccccctttattcgcgtctccaaaaaaacgggacacttgtccggagaacctttaggatgccagccagggcggcggtaatcataaccacgcccagcgcagaggcggccagaaacccgggcgcaattgcggccacgggctgcgtgtcaaaggctagcaaatgaatgacggttccgtttggaaatagcaacaaggccgtggacggcacgtcgctcgaaaacacgcttggggcgccctccgtcggcccggcggcgatttgctgctgtgtgttgtccgtatccaccagcaacacagacatgacctccccggccggggtgtagcgcataaacacggcccccacgagccccaggtcgcgctggttttgggtgcgcaccagccgcttggactcgatatcccgggtggagccttcgcatgtcgcggtgaggtaggttaggaacagtgggcgtcggacgtcgacgccggtgagcttgtagccgatcccccggggcagaggggagtgggtgacgacgtagctggcgttgtgggtgatgggtaccaggatccgtggctcgacgttggcagactgccccccgcaccgatgtgaggcctcagggacgaaggcgcggatcagggcgttgtagtgtgcccagcgcgtcagggtcgaggcgaggccgtgggtctgctgggccaggacttcgaccggggtctcggatcgggtggcttgagccagcgcgtccaggataaacacgctctcgtctagatcaaagcgcagggaggccgcgcatggcgaaaagtggtccggaagccaaaagagggttttctggtggtcggcccgggccagcgcggtccggaggtcggcgttggtcgctgcggcgacgtcggacgtacacagggccgaggctatcagaaggctccggcgggcgcgttcccgctgcaccgccgaggggacgcccgccaagaacggctgccggaggacagccgaggcgtaaaatagcgcccggtggacgaccggggtggtcagcacgcggccccctagaaactcggcatacagggcgtcgatgagatgggctgcgctgggcgccactgcgtcgtacgccgaggggctatccagcacgaaggccagctgatagcccagcgcgtgtaatgccaagctctgttcgcgctccagaatctcggccaccaggtgctggagccgagcctctagctgcaggcgggccgtgggatccaagactgacacattaaaaaacacagaatccgcggcacagcccgcggccccgcgggcggccaacccggcaagcgcgcgcgagtgggccaaaaagcctagcaggtcggagaggcagaccgcgccgtttgcgtgggcggcgttcacgaaagcaaaacccgacgtcgcgagcagccccgttaggcgccagaagagagggggacgcgggccctgctcggcgcccgcgtcccccgagaaaaactccgcgtatgcccgcgacaggaactgggcgtagttcgtgccctcctccgggtagccgcccacgcggcggagggcgtccagcgcggagccgttgtcggcccgcgtcagggaccctaggacaaagacccgataccgggggccgcccgggggcccgggaagagcccccggggggttttcgtccgcggggtccccgacccgatctagcgtctggcccgcggggaccaccatcacttccaccggagggctgtcgtgcatggatatcacgagccccatgaattcccgcccgtagcgcgcgcgcaccagcgcggcatcgcacccgagcaccagctcccccgtcgtccagatgcccacgggccacgtcgaggccgacggggagaaatacacgtacctacctggggatctcaacaggccccgggtggccaaccaggtcgtggacgcgttgtgcaggtgcgtgatgtccagctccgtcgtcgggtgccgccgggccccaaccggcggtcgggggggcggtgtatcacgcggcccgctcgggtggctcgccgtcgccacgttgtctccccgcgggaacgtcagggcctcggggtcagggacggccgaaaacgttacccaggcccgggaacgcagcaacacggaggcggttggattgtgcaagagacccttaaggggggcgaccgcggggggaggctgggcggtcggctcgaccgtgatgggggcgggcaggctcgcgttcgggggccggccgagcaggtaggtcttcgagatgtaaagcagctggccggggtcccgcggaaactcggccgtggtgaccaatacaaaacaaaagcgctcctcgtaccagcgaagaaggggcagagatgccgtagtcaggtttagttcgtccggcggcgccagaaatccgcgcggtggtttttgggggtcgggggtgtttggcagccacagacgcccggtgttcgtgtcgcgccagtacatgcggtccatgcccaggccatccaaaaaccatgggtctgtctgctcagtccagtcgtggacctgaccccacgcaacgcccaaaagaataacccccacgaaccataaaccattccccatgggggaccccgtccctaacccacggggcccgtggctatggcagggcttgccgccccgacgttggctgcgagccctgggccttcacccgaacttgggggttggggtggggaaaaggaagaaacgcgggcgtattggccccaatggggtctcggtggggtatcgacagagtgccagccctgggaccgaaccccgcgtttatgaacaaacgacccaacacccgtgcgttttattctgtctttttatttccgtcatagcgcgggttccttccggtattgtctccttccgtgtttcagttagcctcccccatctcccgggcaaacgtgcgcgccaggtcgcagatcgtcggtatggagcctggggtggtgacgtgggtctggaccatcccggaggtaagttgcagcagggcgtcccggcagccggcgggcgattggtcgtaatccaggataaagacgtgcatgggacggaggcgtttggccaagacgtccaaggcccaggcaaacacgttatacaggtcgccgttgggggccagcaactcgggggcccgaaacagggtaaataacgtgtccccgatatggggtcgtgggcccgcgttgctctggggctcggcaccctggggcggcacggccgtccccgaaagctgtccccaatcctcccgccacgacccgccgccctgcagataccgcaccgtattggcaagcagcccgtaaacgcggcgaatcgcggccaacatagccaggtcaagccgctcgccggggcgctggcgtttggccaggcggtcgatgtgtctgtcctccggaagggcccccaacacgatgtttgtgccgggcaaggtcggcgggatgagggccacgaacgccagcacggcctggggggtcatgctgcccataaggtatcgcgcggccgggtagcacaggagggcggcgatgggatggcggtcgaagatgagggtgagggccgggggcggggcatgtgagctcccagcctcccccccgatatgaggagccagaacggcgtcggtcacggcataaggcatgcccattgttatctgggcgcttgtcattaccaccgccgcgtccccggccgatatctcaccctggtcgaggcggtgttgtgtggtgtagatgttcgcgattgtctcggaagcccccagcacctgccagtaagtcatcggctcgggtacgtagacgatatcgtcgcgcgaacccagggccaccagcagttgcgtggtggtggttttccccatcccgtgaggaccgtctatataaacccgcagtagcgtgggcattttctgctccaggcggacttccgtggcttcttgctgccggcgagggcgcaacgccgtacgtcggttgctatggccgcgagaacgcgcagcctggtcgaacgcagacgcgtgttgatggcaggggtacgaagccatacgcgcttctacaaggcgcttgccaaagaggtgcgggagtttcacgccaccaagatctgcggcacgctgttgacgctgttaagcgggtcgctgcagggtcgctcggtgttcgaggccacacgcgtcaccttaatatgcgaagtggacctgggaccgcgccgccccgactgcatctgcgtgttcgaattcgccaatgacaagacgctgggcggggtttgtgtcatcatagaactaaagacatgcaaatatatttcttccggggacaccgccagcaaacgcgagcaacgggccacggggatgaagcagctgcgccactccctgaagctcctgcagtccctcgcgcctccgggtgacaagatagtgtacctgtgccccgtcctggtgtttgtcgcccaacggacgctccgcgtcagccgcgtgacccggctcgtcccgcagaaggtctccggtaatatcaccgcagtcgtgcggatgctccagagcctgtccacgtatacggtccccatggagcctaggacccagcgagcccgtcgccgccgcggcggcgctgcccgggggtctgcgagcagaccgaaaaggtcacactctggggcgcgcgacccgcccgagccagcggcccgccaggtaccacccgccgaccaaacccccgcctccacggagggcgggggggtgcttaagaggatcgcggcgctcttctgcgtgcccgtggccaccaagaccaaaccccgagctgcctccgaatgagagtgtttcgttccttccccctccccccgcgtcagacaaaccctaaccaccgcttaagcggcccccgcgaggtccgaagactcatttggatccggcgggagccacctgacaacagcccccgggtttccccacgccagacgccggtccgctgtgccatcgctccccttcatcccacccccatcttgtccccaaataaaacaaggtctggtagttaggacaacgaccgcagttctcgtgtgttattgtcgctctccgcctctcgcagatggacccgtattgcccatttgacgctctggacgtctgggaacacaggcgcttcatagtcgccgattcccgaaacttcatcacccccgagttcccccgggacttttggatgtcgcccgtctttaacctcccccgggagacggcggcggagcaggtggtcgtcctgcaggcccagcgcacagcggctgccgctgccctggagaacgccgccatgcaggcggccgagctccccgtcgatatcgagcgccggttacgcccgatcgaacggaacgtgcacgagatcgcaggcgccctggaggcgctggagacggcggcggccgccgccgaagaggcggatgccgcgcgcggggatgagccggcgggtgggggcgacgggggggcgcccccgggtctggccgtcgcggagatggaggtccagatcgtgcgcaacgacccgccgctacgatacgacaccaacctccccgtggatctgctacatatggtgtacgcgggccgcggggcgaccggctcgtcgggggtggtgttcgggacctggtaccgcactatccaggaccgcaccatcacggactttcccctgaccacccgcagtgccgactttcgggacggccggatgtccaagaccttcatgacggcgctggtcctgtccctgcagtcgtgcggccggctgtatgtgggccagcgccactattccgccttcgagtgcgccgtgttgtgtctctacctgctgtaccgaaacacgcacggggccgccgacgatagcgaccgcgctccggtcacgttcggggatctgctgggccggctgccccgctacctggcgtgcctggccgcggtgatcgggaccgagggcggccggccacagtaccgctaccgcgacgacaagctccccaagacgcagttcgcggccggcgggggccgctacgaacacggagcgctggcgtcgcacatcgtgatcgccacgctgatgcaccacggggtgctcccggcggccccgggggacgtcccccgggacgcgagcacccacgttaaccccgacggcgtggcgcaccacgacgacataaaccgcgccgccgccgcgttcctcagccggggccacaacctattcctgtgggaggaccagactctgctgcgggcaaccgcgaacaccataacggccctgggcgttatccagcggctcctcgcgaacggcaacgtgtacgcggaccgcctcaacaaccgcctgcagctgggcatgctgatccccggagccgtcccttcggaggccatcgcccgtggggcctccgggtccgactcgggggccatcaagagcggagacaacaatctggaggcgctatgtgccaattacgtgcttccgctgtaccgggccgacccggcggtcgagctgacccagctgtttcccggcctggccgccctgtgtcttgacgcccaggcggggcggccggtcgggtcgacgcggcgggtggtggatatgtcatcgggggcccgccaggcggcgctggtgcgcctcaccgccctggaactcatcaaccgcacccgcacaaaccccacccccgtgggggaggttatccacgcccacgacgccctggcgatccaatacgaacaggggcttggcctgctggcgcagcaggcacgcattggcttgggctccaacaccaagcgtttctccgcgttcaacgttagcagcgactacgacatgttgtactttttatgtctggggttcattccacagtacctgtcggcggtttagtgggtggtgggcgaggggggagggggcattagggagaaagaacaagagcctccgttgggttttctttgtgcctgtactcaaaaggtcataccccgtaaacggcgggctccagtcccggcccggcggttggcgtgaacgcaacggcgggagctgggttagcgtttagtttagcattcgctctcgcctttccgcccgcccccgaccgttgagcctttttttttttcgtccaccaaagtctctgtgggtgcgcgcatggcagccgatgccccgggagaccggatggaggagcccctgccagacagggccgtgcccatttacgtggctgggtttttggccctgtatgacagcggggactcgggcgagttggcattggatccggatacggtgcgggcggccctgcctccggataacccactcccgattaacgtggaccaccgcgctggctgcgaggtggggcgggtgctggccgtggtcgacgacccccgcgggccgttttttgtgggactgatcgcctgcgtgcaactggagcgcgtcctcgagacggccgccagcgctgcgattttcgagcgccgcgggccgccgctctcccgggaggagcgcctgttgtacctgatcaccaactacctgccctcggtctccctggccacaaaacgcctggggggcgaggcgcaccccgatcgcacgctgttcgcgcacgtagcgctgtgcgcgatcgggcggcgccttggcactatcgtcacctacgacaccggtctcgacgccgccatcgcgccctttcgccacctgtcgccggcgtctcgcgagggggcgcggcgactggccgccgaggccgagctcgcgctatccggacgcacctgggcgcccggcgtggaggcgctgacccacacgctgctttccaccgccgttaacaacatgatgctgcgggaccgctggagcctggtggccgagcggcggcggcaggccgggatcgccggacacacctacctccaggcgagcgaaaaattcaaaatgtggggggcggagcctgtttccgcgccggcgcgcgggtataagaacggggccccggagtccacggacataccgcccggctcgatcgctgccgcgccgcagggtgaccggtgcccaatcgtccgtcagcgcggggtcgcctcgcccccggtactgccccccatgaaccccgttccaacatcgggcaccccggcccccgcgccgcccggcgacgggagctacctgtggatcccggcctcccattacaaccagctcgtcgccggccacgccgcgccccaaccccagccgcattccgcgtttggtttcccggctgcggcgggggccgtggcctatgggcctcacggcgcgggtctttcccagcattaccctccccacgtcgcccatcagtatcccggggtgctgttctcgggacccagcccactcgaggcgcagatagccgcgttggtgggggccatagccgcggaccgccaggcgggcggtcagccggccgcgggagaccctggggtccgggggtcgggaaagcgtcgccggtacgaggcggggccgtcggagtcctactgcgaccaggacgaaccggacgcggactacccgtactaccccggggaggctcgaggcgggccgcgcggggtcgactctcggcgcgcggcccgccagtctcccgggaccaacgagaccatcacggcgctgatgggggcggtgacgtctctgcagcaggaactggcgcacatgcgggctcggaccagcgccccctatggaatgtacacgccggtggcgcactatcgccctcaggtgggggagccggaaccaacaacgacccacccggccctttgtcccccggaggccgtgtatcgccccccaccacacagcgccccctacggtcctccccagggtccggcgtcccatgcccccactcccccgtatgccccagctgcctgcccgccaggcccgccaccgcccccatgtccttccacccagacgcgcgcccctctaccgacggagcccgcgttcccccccgccgccaccggatcccaaccggaggcatccaacgcggaggccggggcccttgtcaacgccagcagcgcagcacacgtggacgttgacacggcccgcgccgccgatttgttcgtctctcagatgatgggggcccgctgattcgccccggtctttggtaccatgggatgtcttactgtatatctttttaaataaaccaggtaataccaaataagacccattggtgtatgttcttttttttttattgggaggggcgggtaggcgggtagctttacaatgcaaaagcctttgacgtggaggaaggcgtgggggggaggaaatcggcactgaccaagggggtccgttttgtcacgggaaaggaaagaggaaacaggccgcggacacccgggggagtttatgtgttcctttttctttcttcccacacacacacaaaaggcgtaccaaacaaaaaaaccaaaagatgcgcatgcggtttaacacccgtggtttttatttacaacaaaccccccgtcacaggtcgtcctcgtcggcgtcaccgtctttgttgggaacttgggtgtagttggtgttgcggcgcttgcgcatgaccatgtcggtgaccttggcgctgagcagcgcgctcgtgcccttcttcttggccttgtgttccgtgcgctccatggccgacaccagggccatgtaccgtatcatctccctggcctcggctagcttggcctcgtcaaagtcgccgccctcctcgccctccccggacgcgtccgggttggtggggttcttgagctccttggtggttagagggtacagggccttcatggggttgctctgcagccgcatgacgtaacgaaaggcgaagaaggccgccgccaggccggccaggaccaacagacccacggccagcgccccaaaggggttggacatgaaggaggacacgcccgacacggccgataccacgccgcccacgatgcccatcaccaccttgccgaccgcgcgccccaggtcgcccatcccctcgaagaacgcgcccaggcccgcgaacatggcggcgttggcgtcggcgtggatgaccgtgtcgatgtcggcgaagcgcaggtcgtgcagctggttgcggcgctggacctccgtgtagtccagcaggccgctgtccttgatctcgtggcgggtgtacacctccagggggacaaactcgtgatcctccagcatggtgatgttgaggtcgatgaaggtgctgacggtggtgatgtcggcgcggctcagctggtgggagtacgcgtactcctcgaagtacacgtagcccccaccgaaggtgaagtagcgccggtgtcccacggtgcacggctcgatcgcatcgcgcgtcagccgcagctcgttgttctcccccagctgcccctcgaccaacgggccctggtcttcgtaccgaaagctgaccagggggcggctgtagcaggccccgggccgcgagctgatgcgcatcgagttttggacgatcacgttgtccgcggcgaccggcacgcacgtggagacggccatcacgtcgccgagcatccgcgcgctcacccgccggcccacggtgaccgaggcgatggtgttggggttcagcttgcgggcctcgttccacagggtcagctcgtgattctgtagctcgcaccacgcgatggcaacgcggcccaacatatcgttgacatggcgctgtatgtggttgtacgtaaactgcagccgggcgaactcgatggaggaggtggtcttgatgcgctccacggacgcgttggcgctggccccgggcggcgggggcgtggggtttgggggcttgcggctctgctctcggaggtgttcccgcacgtacagctccgcgagcgtgttgctgagaaggggctggtacgcgatcagaaagcccccattggccaggtagtactgcggctggcccaccttgatgtgcgtcgcgttgtacctgcgggcgaagatgcggtccatggcgtcgcgggcgtccttgccgatgcagtcccccaggtccacgcgcgagagcgggtactcggtcaggttggtggtgaaggtggtggatatggcgtcggaggagaatcggaaggagccgccgtactcggagcgcagcatctcgtccacttcctgccacttggtcatggtgcagaccgacgggcgctttggcacccagtcccaggccacggtgaacttgggggtcgtgagcaggttccgggtggtcggcgccgtggcccgggccttggtggtgaggtcgcgcgcgtagaagccgtcgacctgcttgaagcggtcggcggcgtagctggtgtgttcggtgtgcgacccctcccggtagccgtaaaacggggacatgtacacaaagtcgccagtcgccagcacaaactcgttgtacgggtacaccgagcgcgcgtccacctcctcgacgatgcagtttaccgtcgtcccgtaccggtggaacgcctccacccgcgaggggttgtacttgaggtcggtggtgtgccagccccggctcgtgcgggtcgcggcgttggccggtttcagctccatgtcggtctcgtggtcgtcccggtgaaacgcggtggtctccaggttgttgcgcacgtacttggccgtggaccgacagacccccttggcgttgatcttgtcgatcacctcctcgaaggggacgggggcgcggtcctcaaagatccccataaactgggagtagcggtggccgaaccacacctgcgaaacggtgacgtctttgtagtacatggtggccttgaacttgtacggggcgatgttctccttgaagaccaccgcgatgccctccgtgtagttctgaccctcgggccgggtcgggcagcggcgcggctgctcgaactgcaccaccgtggcgcccgtggggggtgggcacacgtaaaagtttgcatcggtgttctccgccttgatgtcccgcaggtgctcgcgcagggtggcgtggcccgcggcgacggtcgcgttgtcgccggcggggcgtggtggcgttgggtttttcggttttttgttcttcttcggtttcgggtcccccgttggggcggcgccaagggcgggcggcgccggagtggcagggcccccgttcgccgcctgggtcgcggccgcgaccccaggcgtgccgggggaactcggagccgccgacgccaccaggacccccagcgtcaaccccaagagcgcccatacgacgaaccaccggcgcccccacgagggggcgccctggtgcatggcgggactacgggggcccgtcgtgccccccgtcaggtagcctgggggcgaggtgctggaggaccgagtagaggatcgagaaaacgtcgcggtcgtagaccacgaccgaccgggggccgatacagccgtcgggggcgctctcgacgatggccaccagcggacagtcggagtcgtacgtgagatatacgccgggcgggtaacggtaacgaccttcggaggtcgggcggctgcagtccgggcggcgcaactcgagctccccgcaccggtagaccgaggcaaagagtgtggtggcgataatcagctcgcgaatatatcgccaggcggcgcgctgagtgggcgttattccggaaatgccgtcaaaacagtaaaacctctgaaattcgctgacggcccaatcagcacccgagccccccgcccccatgatgaaccgggcgagctcctccttcaggtgcggcaggagccccacgttctcgacgctgtaatacagcgcggtgttggggggctgggcgaagctgtgggtggagtgatcaaagaggggcccgttgacgagctcgaagaagcgatgggtgatgctggggagcagggccgggtccacctggtgtcgcaggagagacgctcgcatgaaccggtgcgcgtcgaacacgcccggcgccgagcggttgtcgatgaccgtgcccgcgcccgccgtcagggcgcagaagcgcgcgcgcgccgcaaagccgttggcgaccgcggcgaacgtcgcgggcagcacctcgccgtggacgctgacccgcagcatcttctcgagctccccgcgctgctcgcggacgcagcgccccaggctggccaacgaccgcttcgtcaggcggtccgcgtacagccgccgtcgctcccgtacgtccgcggccgcttgcgtggcgatgtccccccacgtctcgggcccctgccccccgggcccgcggcgacggtcttcgtcctcgcccccgcccccgggagctcccaacccccgtgccccttcctctacggcgacacggtccccgtcgtcgtcggggcccgcgccgcccttgggcgcgtccgccgcgccccccgcccccatgcgcgccagcacgcgacgcagcgcctcctcgtcgcactgttcggggctgacgaggcgccgcaagagcggcgtcgtcaggtggtggtcgtagcacgcgcggatgagcgcctcgatctgatcgtcgggtgacgtggcctgaccgccgattattagggcgtccaccatatccagcgccgccaggtggctcccgaacgcgcgatcgaaatgctccgcccgccgcccgaacagcgccagttccacggccaccgcggcggtctcctgctgcaactcgcgccgcgccagcgcggtcaggttgctggcaaacgcgtccatggtggtctggccggcgcggtcgccggacgcgagccagaatcgcaattcgctgatggcgtacaggccgggcgtggtggcctgaaacacgtcgtgcgcctccagcagggcgtcggcctccttgcggaccgagtcgttctcgggcgacgggtggggctgcccgtcgccccccgcggtccgggccagcgcatggtccaacacggagagcgcccgcgcgcggtcggcgtccgacagcccggcggcgtggggcaggtaccgccgcagctcgttggcgtccagccgcacctgcgcctgctgggtgacgtggttacagatacggtccgccaggcggcgggcgatcgtcgccccctggttcgccgtcacacacagttcctcgaaacagaccgcgcaggggtgggacgggtcgctaagctccggggggacgataaggcccgaccccaccgcccccaccataaactcccgaacgcgctccagcgcggcggtggcgccgcgcgagggggtgatgaggtggcagtagtttagctgctttagaaagttctcgacgtcgtgcaggaaacacagctccatatggacggtcccgccatacgtatccagcctgacccgttggtgatacggacagggtcgggccaggcccatggtctcggtgaaaaacgccgcgacgtctcccgcggtcgcgaacgtctccaggctgcccaggagccgctcgccctcgcgccacgcgtactctagcagcaactccagggtgaccgacagcggggtgagaaaggccccggcctgggcctccaggcccggcctcagacgacgccgcagcgcccgcacctgaagcgcgttcagcttcagttgggggagcttcccccgtccgatgtgggggtcgcaccgccggagcagctctatctgaaacacataggtctgcacctgcccgagcagggctaacaacttttgacgggccacggtgggctcggacaccggggcggccatctcgcggcgccgatctgtaccgcggccggagtatgcggtggaccgaggcggtccgtacgctacccggtgtctggctgagccccggggtccccctcttcggggcggcctcccgcgggcccgccgaccggcaagccgggagtcggcggcgcgtgcgtttctgttctattcccagacaccgcggagaggaatcacggcccgcccagagatatagacacggaacacaaacaagcacggatgtcgtagcaataatttattttacacacattccccgccccgccctaggttcccccaccccccaacccctcacagcatatccaacgtcaggtctccctttttgtcggggggcccctccccaaacgggtcatccccgtggaacgcccgtttgcggccggcaaatgccggtcccggggcccccgggccgccgaacggcgtcgcgttgtcgtcctcgcagccaaaatccccaaagttaaacacctccccggcgttgccgagttggctgactagggcctcggcctcgtgcgccacctccagggccgcgtccgtcgaccactcgccgttgccgcgctccagggcacgcgcggtcagctccatcatctcctcgcttaggtactcgtcctccaggagcgccagccagtcctcgatctgcagctgctgggtgcggggccccaggcttttcacggtcgccacgaacacgctactggcgacggccgccccgccctcggagataatgccccggagctgctcgcacagcgagctttcgtgcgctccgccgccgaggttcgaggccgcgcacacaaacccggcccggggacaggccaggacgaacttgcgggtgcggtcaaaaataaggagcgggcacgcgtttttgccgcccatcaggctggcccagttcccggcctgaaacacacggtcgttgccggccatgccgtagtatttgctgatgctcaaccccaacacgaccatggggcgcgccgccatgacgggccgcagcaggttgcagctggcgaacatggacgtccacgcgcccggatgcgcgtccacggcgtccatcagcgcgcgggccccggcctccaggcccgccccgccctgcgcggaccacgcggccgccgcctgcacgctggggggacggcgggaccccgcgatgatggccgtgagggtgttgatgaagtatgtcgagtgatcgcagtaccgcagaatctggtttgccatgtagtacatcgccagctcgctcacgttgttgggggccaggttaataaagtttatcgcgccgtagtccagggaaaactttttaatgaacgcgatggtctcgatgtcctcgcgcgacaggagccgggcgggaagctggttgcgttggagggccgtccagaaccactgcgggttcggctggttggaccccgggggcttgccgttggggaagatggccgcgtggaactgcttcagcagaaagcccagcggtccgaggaggatgtccacgcgcttgtcgggcttctggtaggcgctctggaggctggcgacccgcgccttggcggcctcggacgcgttggcgctcgcgcccgcgaacaacacgcggctcttgacgcgcagctccttgggaaaccccagggtcacgcgggcaacgtcgccctcgaagctgctctcggcgggggccgtctggccggccgttaggctgggggcgcagatagccgccccctccgagagcgcgaccgtcagcgttttggccgacagaaacccgttgttaaacatgtccatcacgcgccgccgcagcaccggttggaattgattgcgaaagttgcgcccctcgaccgactgcccggcgaacaccccgtggcactggctcagggccaggtcctgatacacggcgaggttggatcgccgcccgagaagctgaagcagggggcatggcccgcacgcgtacgggtccagcgtcagggacatggcgtggttggcctcgcccagaccgtcgcgaaacttgaagttcctcccctccaccaggttgcgcatcagctgctccacctcgcggtccacgacctgcctgacgttgttcaccaccgtatgcagggcctcgcggttggtgatgatggtctccagccgccccatggccgtggggaccgcctggtccacgtactgcagggtctcgagttcggccatgacgcgctcggtcgccgcgcggtacgtctcctgcatgatggtccgggcggtctcggatccgtccgcgcgcttcagggccgagaaggcggcgtagtttcccagcacgtcgcagtcgctgtacatgctgttcatggtcccgaagacgccgatggctccgcgggcggcgctggcgaacttgggatggcgcgcccggaggcgcatgagcgtcgtgtgtacgcaggcgtggcgcgtgtcgaaggtgcacaggttgcagggcacgtcggtctggttggagtccgcgacgtatcgaaacacgtccatctcctggcgcccgacgatcacgccgccgtcgcagcgctccaggtaaaacagcatcttggccagcagcgccggggaaaacccacacagcatggccaggtgctcgccggcaaattcctgggttccgccgacgaggggcgcggtgggccgaccctcgaacccgggcaccacgtgtccctcgcggtccacctgtgggttggccgccacgtgggtcccgggcacgaggaagaagcggtaaaaggagggtttgctgtggtcctttgggtccgccggaccggcgtcgtccacctcggtgagatggagggccgagttggtgctaaataccatggcccccacgagtcccgcggcgcgcgccaggtacgccccgacggcgttggcgcgggccgcggccgtgtcctggccctcgcacagcggccacgcggagatgtcggtgggcggctcgtcgaagacggccatcgacacgatagactcgagggccagggcggcgtctccggccatgacggaggccaggcgctgttcgaacccgcccgccgggcccttgccgccgccgtcgcgcccaccccgcggggtcttaccctggctggcttcgaaggccgtgaacgtaatgtcggcggggagggcggcgccctcgtggttttcgtcaaacgccaggtgggcggccgcgcgggccacggcgtccacgtttcggcatcgcagtgccacggcggcgggtcccacgaccgcctcgaacaggaggcggttgagggggcggttaaaaaacggaagcgggtaggtaaaattctccccgatcgatcggtggttggcgttgaacggctcggcgatgacccggctaaaatccggcatgaacagctgcaacggatacacgggtatgcggtgcacctccgccccgcctatggttaccttgtccgagcctcccaggtgcagaaaggtgttgttgatgcacacggcctccttgaagccctcggtaacgaccagatacaggagggcgcggtccgggtccaggccgaggcgctcacacagcgcctcccccgtcgtctcgtgtttgaggtcgccgggccggggggtgtagtccgaaaagccaaaatggcggcgtgcccgctcgcagagtcgcgtcaggtttggggcctgggtgctggggtccaggtgccggccgccgtgaaagacgtacacggacgagctgtagtgcgatggcgtcagtttcagggacaccgcggtacccccgagccccgtcgtgcgagaacccacgaccacggctacgttggcctcaaagccgctctccacggtcaggcccacgaccaggggcgccacggcgacgtcggcatcgccgctgcgcgccgacagtaacgccagaagctcgatgccttcggacggacacgcgcgagcgtacacgtatcccaggggcccgggggggaccttgatggtggttgccgtcttgggctttgtctccatgtcctcctggcaatcggtccgcaaacggaggtaatcccggcacgacgacggacgcccgacgaggtatgtctcccgagcgtcaaaatccgggggggggggcggcgacggtcaaggggagggtgggagaccggggttggggaatgaatccctacccttcacagacaacccccgggtaaccacggggtgccgatgaaccccggcggctggcaacgcggggtccctgcgagaggcacagatgcttacggtcaggtgctccgggccgggtgcgtctgatatgcggttggtatatgtacactttacctgggggcgtgccggaccgccccagcccctcccacaccccgcgcgtcatcagccggatttaaatccggctacgtcacgctcctgtcggccgccggcggtccataagcccggccggccgggccgacgcgaataaaccgggccgccggccggggcgccgcgcagcagctcgccgcccggatccgccagacaaacaaggcccttgcacatgccggcccgggcgagcctgggggtccggtaattttgccatcccacccaagcggcttttggggtttttcctcttcccccctccccacatcccccctctttaggggttcgggtgggaacaaccgcgatgttttccggtggcggcggcccgctgtcccccggaggaaagtcggcggccagggcggcgtccgggttttttgcgcccgccggccctcgcggagccggccggggacccccgccttgtttgaggcaaaacttttacaacccctacctcgccccagtcgggacgcaacagaagccgaccgggccaacccagcgccatacgtactatagcgaatgcgatgaatttcgattcatcgccccgcgggtgctggacgaggatgcccccccggagaagcgcgccggggtgcacgacggtcacctcaagcgcgcccccaaggtgtactgcgggggggacgagcgcgacgtcctccgcgtcgggtcgggcggcttctggccgcggcgctcgcgcctgtggggcggcgtggaccacgccccggcggggttcaaccccaccgtcaccgtctttcacgtgtacgacatcctggagaacgtggagcacgcgtacggcatgcgcgcggcccagttccacgcgcggtttatggacgccatcacaccgacggggaccgtcatcacgctcctgggcctgactccggaaggccaccgggtggccgttcacgtttacggcacgcggcagtacttttacatgaacaaggaggaggttgacaggcacctacaatgccgcgccccacgagatctctgcgagcgcatggccgcggccctgcgcgagtccccgggcgcgtcgttccgcggcatctccgcggaccacttcgaggcggaggtggtggagcgcaccgacgtgtactactacgagacgcgccccgctctgttttaccgcgtctacgtccgaagcgggcgcgtgctgtcgtacctgtgcgacaacttctgcccggccatcaagaagtacgagggtggggtcgacgccaccacccggttcatcctggacaaccccgggttcgtcaccttcggctggtaccgtctcaaaccgggccggaacaacacgctagcccagccgcgggccccgatggccttcgggacatccagcgacgtcgagtttaactgtacggcggacaacctggccatcgaggggggcatgagcgacctaccggcatacaagctcatgtgcttcgatatcgaatgcaaggcggggggggaggacgagctggcctttccggtggccgggcacccggaggacctggttattcagatatcctgtctgctctacgacctgtccaccaccgccctggagcacgtcctcctgttttcgctcggttcctgcgacctccccgaatcccacctgaacgagctggcggccaggggcctgcccacgcccgtggttctggaattcgacagcgaattcgagatgctgttggccttcatgacccttgtgaaacagtacggccccgagttcgtgaccgggtacaacatcatcaacttcgactggcccttcttgctggccaagctgacggacatttacaaggtccccctggacgggtacggccgcatgaacggccggggcgtgtttcgcgtgtgggacataggccagagccacttccagaagcgcagcaagataaaggtgaacggcatggtgaacatcgacatgtacgggatcataaccgacaagatcaagctctcgagctacaagctcaacgccgtggccgaagccgtcctgaaggacaagaagaaggacctgagctatcgcgacatccccgcctactacgccaccgggcccgcgcaacgcggggtgatcggcgagtactgcatacaggattccctgctggtgggccagctgttttttaagtttttgccccatctggagctctcggccgtcgcgcgcttggcgggtattaacatcacccgcaccatctacgacggccagcagatccgcgtctttacgtgcctgctgcgcctggccgaccagaagggctttattctgccggacacccaggggcgatttaggggcgccgggggggaggcgcccaagcgtccggccgcagcccgggaggacgaggagcggccagaggaggagggggaggacgaggacgaacgcgaggagggcgggggcgagcgggagccggagggcgcgcgggagaccgccggccggcacgtggggtaccagggggccagggtccttgaccccacttccgggtttcacgtgaaccccgtggtggtgttcgactttgccagcctgtaccccagcatcatccaggcccacaacctgtgcttcagcacgctctccctgagggccgacgcagtggcgcacctggaggcgggcaaggactacctggagatcgaggtgggggggcgacggctgttcttcgtcaaggctcacgtgcgagagagcctcctcagcatcctcctgcgggactggctcgccatgcgaaagcagatccgctcgcggattccccagagcagccccgaggaggccgtgctcctggacaagcagcaggccgccatcaaggtcgtgtgtaactcggtgtacgggttcacgggagtgcagcacggactcctgccgtgcctgcacgttgccgcgacggtgacgaccatcggccgcgagatgctgctcgcgacccgcgagtacgtccacgcgcgctgggcggccttcgaacagctcctggccgatttcccggaggcggccgacatgcgcgcccccgggccctattccatgcgcatcatctacggggacacggactccatatttgtgctgtgccgcggcctcacggccgccgggctgacggccatgggcgacaagatggcgagccacatctcgcgcgcgctgtttctgccccccatcaaactcgagtgcgaaaagacgttcaccaagctgctgctgatcgccaagaaaaagtacatcggcgtcatctacgggggtaagatgctcatcaagggcgtggatctggtgcgcaaaaacaactgcgcgtttatcaaccgcacctccagggccctggtcgacctgctgttttacgacgataccgtatccggagcggccgccgcgttagccgagcgccccgcagaggagtggctggcgcgacccctgcccgagggactgcaggcgttcggggccgtcctcgtagacgcccatcggcgcatcaccgacccggagagggacatccaggactttgtcctcaccgccgaactgagcagacacccgcgcgcgtacaccaacaagcgcctggcccacctgacggtgtattacaagctcatggcccgccgcgcgcaggtcccgtccatcaaggaccggatcccgtacgtgatcgtggcccagacccgcgaggtagaggagacggtcgcgcggctggccgccctccgcgagctagacgccgccgccccaggggacgagcccgccccccccgcggccctgccctccccggccaagcgcccccgggagacgccgtcgcatgccgaccccccgggaggcgcgtccaagccccgcaagctgctggtgtccgagctggccgaggatcccgcatacgccattgcccacggcgtcgccctgaacacggactattacttctcccacctgttgggggcggcgtgcgtgacattcaaggccctgtttgggaataacgccaagatcaccgagagtctgttaaaaaggtttattcccgaagtgtggcaccccccggacgacgtggccgcgcggctccgggccgcagggttcggggcggtgggtgccggcgctacggcggaggaaactcgtcgaatgttgcatagagcctttgatactctagcatgagccccccgtcgaagctgatgtccctcattttacaataaatgtctgcggccgacacggtcggaatctccgcgtccgtgggtttctctgcgttgcgccggaccacgagcacaaacgtgctctgccacacgtgggcgacgaaccggtaccccgggcacgcggtgagcatccggtctatgagccggtagtgcaggtgggcggacgtgccgggaaagatgacgtacagcatgtggcccccgtaagtggggtccgggtaaaacaacagccgcgggtcgcacgccccgcctccgcgcaggatcgtgtggacgaaaaaaagctcgggttggccaagaatcccggccaagaggtcctggaggggggcgttgtggcggtcggccaacacgaccaaggaggccaggaaggcgcgatgctcgaatatcgtgttgatctgctgcacgaaggccaggattagggcctcgcggctggtggcggcgaaccgcccgtctcccgcgttgcacgcgggacagcaacccccgatgcctaggtagtagcccatcccggagagggtcaggcagttgtcggccacggtctggtccagacagaagggcagcgacacgggagtggtcttcaccaggggcaccgagaacgagcgcacgatggcgatctcctcggagggcgtctgggcgagggcggcgaaaaggccccgatagcgctggcgctcgtgtaaacacagctcctgtttgcgggcgtgaggcggcaggctcttccgggaggcccgacgcaccacgcccagagtcccgccggccgcagaggagcacgaccgccggcgctccttgccgtgatagggcccgggccgggagccgcggcgatgggggtcggtatcatacataggtacacagggtgtgctccagggacaggagcgagatcgagtggcgtctaagcagcgcgcccgcctcacggacaaatgtggcgagcgcggtgggctttggtacaaatacctgatacgtcttgaaggtgtagatgagggcacgcaacgctatgcagacacgcccctcgaactcgttcccgcaggccagcttggccttgtggagcagcagctcgtcgggatgggtggcggggggatggccgaacagaacccaggggtcaacctccatctccgtgatggcgcacatggggtcacagaacatgtgcttaaagatggcctcgggccccgcggcccgcagcaggctcacaaaccggcccccgtccccgggctgcgtctcggggtccgcctcgagctggtcgacgacgggtacgatacagtcgaagaggctcgtgttgttttccgagtagcggaccacggaggcccggagtctgcgcagggccagccagtaagcccgcaccagtaacaggttacacagcaggcattctccgccggtgcgcccgcgcccccggccgtgtttcagcacggtggccatcagagggcccaggtcgaggtcgggctgggcatcgggttcggtaaactgcgcaaagcgcggagccacgtcgcgcgtgcgtgccccgcgatgcgcttcccaggactggcggaccgtggcgcgacgggcctccgcggcagcgcgcagctggggccccgactcccagacggcgggggtgccggcgaggagcagcaggaccagatccgcgtacgcccacgtatccggcgactcctccggctcgcggtccccggcgaccgtctcgaattccccgttgcgagcggcggcgcgcgtacagcagctgtccccgcccccgcgccgaccctccgtgcagtccaggagacgggcgcaatccttccagttcatcagcgcggtggtgagcgacggctgcgtgccggatcccgccgccgaccccgccccctcctcgcccccggaggccaaggttccgatgagggcccgggtggcagactgcgccaggaacgagtagttggagtactgcaccttggcggctcccggggagggcgagggcttgggttgcttctgggcatgccgcccgggcaccccgccgtcggtacggaagcagcagtggagaaaaaagtgccggtggatgtcgtttatggtgagggcaaagcgtgcgaaggagccgaccagggtcgccttcttggtgcgcagaaagtggcggtccatgacgtacacaaactcgaacgcggccacgaagatgctagcggcgcagtggggcgcccccaggcatttggcacagagaaacgcgtaatcggccacccactggggcgagaggcggtaggtttgcttgtacagctcgatggtgcggcagaccagacagggccggtccagcgcgaaggtgtcgatggccgccgcggaaaagggcccggtgtccaaaagcccctccccacagggatccgggggcgggttgcggggtcctccgcgcccgcccgaaccccctccgtcgcccgcccccccgcgggcccttgagggggcggtgaccacgtcggcggcgacgtcctcgtcgagcgtaccgacgggcggcacacctatcacgtgactggccgccaggagctcggcgcagagagcctcgttaagagccaggaggctgggatcgaaggccacatacgcgcgctcgaacgcccccgccttccagctgctgccgggggactcttcgcacaccgcgacgctcgccaggaccccggggggcgaagttgccatggctgggcgggaggggcgcacgcgccagcgaactttacgggacacaatccccgactgcgcgctgcggtcccagaccctggagagtctagacgcgcgctacgtctcgcgagacggcgcgcatgacgcggccgtctggttcgaggatatgacccccgccgagctggaggttgtcttcccgactacggacgccaagctgaactacctgtcgcggacgcagcggctggcctccctcctgacgtacgccgggcctataaaagcgcccgacgacgccgccgccccgcagaccccggacaccgcgtgtgtgcacggcgagctgctcgcccgcaagcgggaaagattcgcggcggtcattaaccggttcctggacctgcaccagattctgcggggctgacgcgcgcgctgttgggcgggacggttcgcgaaccctttggtgggtttacgcgggcacgcacgctcccatcgcgggcgccatggcgggactgggcaagccctaccccggccacccaggtgacgccttcgagggtctcgttcagcgaattcggcttatcgtcccatctacgttgcggggcggggacggggaggcgggcccctactctccctccagcctcccctccaggtgcgcctttcagtttcatggccatgacgggtccgacgagtcgtttcccatcgagtatgtactgcggcttatgaacgactgggccgaggtcccgtgcaacccttacctgcgcatacagaacaccggcgtgtcggtgctgtttcaggggttttttcatcgcccacacaacgcccccgggggcgcgattacgccagagcggaccaatgtgatcctgggctccaccgagacgacggggctgtccctcggcgacctggacaccatcaaggggcggctcggcctggatgcccggccgatgatggccagcatgtggatcagctgctttgtgcgcatgccccgcgtgcagctcgcgtttcggttcatgggccccgaagatgccggacggacgagacggatcctgtgccgcgccgccgagcaggctattacccgtcgccgccgaacccggcggtcccgggaggcgtacggggccgaggccgggctgggggtggctggaacgggtttccgggccaggggggacggttttggcccgctccccttgttaacccaagggccctcccgcccgtggcaccaggccctgcggggtcttaagcacctacggattggcccccccgcgctcgttttggcggcgggactcgtcctgggggccgctatttggtgggtggttggtgctggcgcgcgcctataaaaaaggacgcaccgccgccctaatcgccagtgcgttccggacgccttcgccccacacagccctcccgtccgacacccccatatcgcttcccgacctccggtcccgatggccgtcccgcaatttcaccgccccagcaccgttaccaccgatagcgtccgggcgcttggcatgcgcgggctcgtcttggccaccaataactctcagtttatcatggataacaaccacccgcacccccagggcacccaaggggccgtgcgggagtttctccgcggtcaggcggcggcgctgacggaccttggtctggcccacgcaaacaacacgtttaccccgcagcctatgttcgcgggcgacgccccggccgcctggttgcggcccgcgtttggcctgcggcgcacctattcaccgtttgtcgttcgagaaccttcgacgcccgggaccccgtgaggcccggggagttccttctggggtgttttaatcaataaaagaccacaccaacgcacgagccttgcgtttaatgtcgtgtttattcaagggagtgggatagggttcgacggttcgaaacttaacacacaaaataatcgagcgcgtctagcccagtaacatgcgcacgtgatgtaggctggtcagcacggcgtcgctgtgatgaagcagcgcccggcgggtccgctgtaactgctgttgtaggcggtaacaggcgcggatcagcaccgccagggcgctacgaccggtgcgttgcacgtagcgtcgcgacagaactgcgtttgccgatacgggcggggggccgaattgtaagcgcgtcacctcttgggagtcatcggcggataacgcactgaatggttcgttggttatgggggagtgtggttcccgagggagtgggtcgagcgcctcggcctcggaatccgagaggaacaacgaggtggtgtcggagtcttcgtcgtcagagacatacagggtctgaagcagcgacacgggcgggggggtagcgtcaatgtgtagcgcgagggaggatgcccacgaagacaccccagacaaggagctgcccgtgcgtggatttgtggacgacgcggaagccgggacggatgggcggttttgcggtgcccggaaccgaaccgccggatactccccgggtgctacatgcccgttttggggctggggttggggctggggctggggctggggttggggctggggttggggttggggctggggttggggctggggctggggttggggctggggttggggctggggttggggctgggggttgggggttggggctgggggttggggttggggctgggggctggggctggggttggggctggggttgggggttgggggctggggttgggggttgggggctggggctggggctggggttggggctggggttggggctggggttggggctggggttgggggctgggggctggggttggggttagttggggttggggttggggctgggggttggggttggggggtggggttggggttggggctgggggttgggggctggggttggggctggggttggggctggggttggggctggggttggggctggggttggggctggggttggggctggggttggggctggggttggggctggggttggggctggggttggggctggggttggggctggggcgcggacaggcggttgacggtcaaatgcccccgggggcgcgcagatgtggtgggcgtggccaccggctgccgtgtagtggggcggcgggaaaccgggcctccgggcgtaacaccgccctccagcgtcaagtatgtggggggcgggcctgacgtcgggggcggggtgacgggttggaccgcgggaggcgggggagagggacctgcgggagaggatgaggtcggctcggccgggttgcggcctaaaacaggggccgtggggtcggcggggtcccagggtgaagggagggattcccgcgattcggacagcgacgcgacagcggggcgcgtaaggcgccgctgcggcccgcctacgggaaccctggggggggttggcgcgggacccgaggttagcggggggcggcggttttcgcccccgggcaaaaccgtgccggttgcgaccgggggcggaacgggatcgatagggagagcgggagaagcctggccggcgaactggggaccgagcgggaggggcacaccagacaccaaagcgtggagcgctggctctgggggtttgggaggggccggggggcgcgcgaaatcggtaaccggggcgaccgtgtcggggagggcaggcggccgccaaccctgggtggtcgcggaagcctgggtggcgcgcgccagggagcgtgcccggcggtgtcggcgcgcgcgcgacccggacgaagaagcggcagaagcgcgggaggaggcgggggggcggggggcggtggcatcggggggcgccggggaactttggggggacggcaagcgccggaagtcgtcgcgggggcccacgggcgccggccgcgtgctttcggccgggacgcccggtcgtgcttcgcgagccgtgactgccggcccagggggccgcggtgcacactgggacgtggggacggactgatcggcggtgggcgaaagggggtccggggcaaggaggggcgcggggccgccggagtcgtcagacgcgagctcctccaggccgtgaatccatgcccacatgcgaggggggacgggctcgccgggggtggcgtcggtgaatagcgtgggggccaggcttccgggccccaacgagccctccgtcccaacaaggtccgccgggccgggggtcgggttcgggaccgaggggctctggtcgtcgggggcgcgctggtacaccggatgccccgggaatagctcccccgacaggagggaggcgtcgaacggccgcccgaggatagctcgcgcgaggaaggggtcctcgtcggtggcgctggcggcgaggacgtcctcgccgcccgccacaaacgggagctcctcggtggcctcgctgccaacaaaccgcacgtcgggggggccgggggggtccgggttttcccacaacaccgcgaccggggtcatggagatgtccacgagcaccagacacggcgggccccgggcgaggggccgctcggcgatgagcgcggacaggcgcgggagctgtgccgccagacacgcgttttcaatcgggttcaggtcggcgtgcaggaggcggacggcccacgtctcgatgtcggacgacacggcatcgcgcaaggcggcgtccggcccgcgagcgcgtgagtcaaacagcgtgagacacagctccagctccgactcgcgggaaaaggccgtggtgttgcggagcgccacgacgacgggcgcgcccaggagcactgccgccagcaccaggtccatggccgtaacgcgcgccgcgggggtgcggtgggtggcggcggccggcacggcgacgtgctggcccgtgggccggtagagggcgttggggggagcggggggtgacgcctcgcgcccccccgaggggctcagcgtctgcccagattccagacgcgcggtcagaagggcgtcgaaactgtcatactctgtgtagtcgtccggaaacatgcaggtccaaagagcggccagagcggtgcttgggagacacatgcgcccgaggacgctcaccgccgccagcgcctgggcgggactcagctttcccagcgcggcgccgcgctcggttcccagctcggggaccgagcgccagggcgccagggggtcggtttcggacaacttgccgcggcgccagtctgccagccgcgtgccgaacatgaggccccgggtcggagggcctccggtcgaaaacactggcagcacgcggatgcgggcgtctggatgcggggtcaggcgctgcacgaatagcatggaatctgctgcgttctgaaacgcacgggggagggtgagatgcatgtactcgtgttggcggaccagatccaggcgccaaaaggtgtaaatgtgttccggggagctggccaccagcgccaccagcacgtcgttctcgttaaaggaaacgcggtgcctagtggagctgtggggcccgagcggcggtcccggggccgccgcgtcacccccccattccagctgggcccagcgacacccaaactcgcgcgtgagagtggtcgcgacgagggcgacgtagagctcggccgccgcatccatcgaggccccccatctcgcctggcggtggcgcacaaagcgtccgaagagctgaaagttggcggcctgggcgtcgctgagggccagctgaagccggttgatgacggtgatgacgtacatggccgtgacggtcgaggccgactccagggtgtccgtcggaagcggggggcgaatgcatgccgcctcgggacacatcagcagcgcgccgagcttgtcggtcacggccgggaagcagagcgcgtactgcagtggcgttccatccgggaccaaaaagctgggggcgaacggccgatccagcgtactggtggcctcgcgcagcaccaggggccccgggcctccgctcactcgcaggtacgcctcgccccggcggcgcagcatctgcgggtcggcctcttggccgggtggggcggacgcccgggcgcgggcgtctagggcgcgaagatccacgagcaggggcgcgggggcggcggccccccccgcgcccgtctggcctgtggccttggcgtacgcgctatataagcccatgcggcgttggatgagctcccgcgcgccccggaactcctccaccgcccatggggccaggtccccggccaccgcgtcgaattccgccaacaggccccccagggtgtcaaagttcatctcccaggccacccttggcaccacctcgtcccgcagccgggcgctcaggtcggcgtgttgggccacgcgccccccgagctcctccacggccccggcccgctcggcgctcttggcgcccaggacgccctggtacttggcgggaaggcgctcgtagtcccgctgggctcgcagccccgacacagtgttggtggtgtcctgcagggcgcgaagctgctcgcatgccgcgcgaaatccctcgggcgatttccaggcccccccgcgaacgcggccgaagcgaccccatacctcgtcccactccgcctcggcctcctcgagagacctccgcagggcctcgacgcggcgacgggtgtcgaagagcgcctgcaggcgcgcgccctgtcgcgtcaggaggcccgggccgtcgccgctggccgcgtttagcgggtgcgtctcaaaggtacgctgggcatgttccaaccaggcgaccgcctgcacgtcgagctcgcgcgccttctccgtctggtccaacagaatttcgacctgatccgcgatctcctccgccgagcgcgcctggtccagcgtcttggccacggtcgccgggacggcgaccaccttcagcagggtcttcagattggccagaccctcggcctcgagctgggcccggcgctcgcgcgcggccagcacctcccgcagccccgccgtgacccgctcggtggcttcggcgcgctgctgtttggcgcgcaccacggcgtccttggtatcggccaggtcctgtcgggtcacgaatgcgacgtagtcggcgtacgccgtgtccttcacggggctctggtccacgcgctccagcgccgccacgcacgccaccagcgcgtcctcgctcgggcagggcagggtgacccctgcccggacaagctcggcggccgccgccgggtcgttgcgcaccgcggatatctcctccgcggcggcggccaggtccagcgccacgcttccgatcgcgcgccgcgcgtcggcccggagggcgtccaggcgatcgcggatatccacgtactcggcgtagcccttttgaaaaaacggcacgtactggcgcagggccggcacgccccccaagtcttccgacaggtgtaggacggcctcgtggtagtcgataaacccgtcgttcgcctgggcccgctccagcagcccccccgccagccgcagaagccgcgccaggggctcggtgtccacccgaaacatgtcggcgtacgtgtcggccgcggccccgaaggccgcgctccagtcgatgcggtgaatggctgcgagcggggggagcatggggtggcgctggttctcgggggtgtatgggttaaacgcaagggccgtctccagggcaagggtcaccgccttggcgttggttcccagcgcctgttcggcccgctttcggaagtcccgggggttgtagccgtgcgtgcccgccagcgcctgcaggcgacggagctcgaccacgtcaaactcggcaccgctttccacgcggtccagcacggcctccacgtcggcggcccagcgctcgtggctactgcgggcgcgctgggccgccatcttctctctcaggtcggcgatggcggcctcaagttcgtcggcgcggcgtcgcgtggcgccgatgacctttcccagctcctgcagggcgcgcccgctgggggagtggtccccggccgtcccttcggcgtgcaacaggcccccgaacctgccctcgtggcccgcgaggctttcccgcgcgccggtggtcgcgcgcgtcgcggcctggatcagggaggcatgctctccctccggttggttggcggcccggcgcacctggacgacaaggtcggctgccgccgaccctaaggtcgtgagctgggcgatggccccccgcgcgtccagggccaaccgagtcgccttgacgtatcccgcggcgctgtcggccatggccgctaggaaggccaggggggaggccgggtcgctggcggccgcgcccagggccgtcaccgcgtcgaccaggacgcggtgcgcccgcacggccgcatccaccgtcgacgcggggtctgccgtcgcgacggcggcgctgccggcgttgatggcgttcgagacggcgtgggctatgatcggggcgtgatcggcgaagaactgcaagagaaacggagtctctggggcgtcggcgaacaggttcttcagcaccaccacgaagctgggatgcaagccagacagagccgtcgccgtgtccggagtcgggtgctccagggcatctcggtactgccccagcagcccccacatgtccgcccgcagcgccgccgtaacctcagggggcgccccccgaacggcctcggggaggtccgaccagcccgccggcagggaggcccgcagggtcgccaggacggccggacaggcctttagccccacaaagtcagggagggggcgcaggaccccctggagtttgtgcaagaacttctcccgggcgtcgcgggccaccttcgcccgctcccgcgctccctcgagcattgcctccagggagcgcgcgcgctcccgcaaacgggcacgcgcatcgggggcgagctctgccgtcagcttggcggcatccatggcccgcgcctgccgcagcgcttcctcggccatgcgcgtggcctctggcgacagcccgccgtcgtcggggtagggcgacgcgccgggcgcaggaacaaaggccgcgtcgctgtccagctgctggcccagggccgcatctagggcgtcgaagcgccgcagctcggccagacccgagctgcggcgcgcctgctggtcgttaatgtcgcggatgctgcgcgccagctcgtccagcggcttgcgttctatcagcccttggttggcggcgtccgtcaggacggagagccaggccgccaggtcctcgggggcgtccagcgtctggccccgctggatcagatcccgcaataggatggccgtggggctggtcgcgatcgggggcggggcgggaatggcggcgcgctgcgcgatgtcccgcgtgtgctggtcgaagacaggcagggactcgagcagctggaccacgggcacgacggcggccgaagccacgtgaaaccggcggtcgttgttgtcgctggcctgtagagccttggcgctgtatacggccccccggtaaaagtactccttaaccgcgccctcgatcgcccgacgggcctgggtccgcacctcctccagccgaacctgaacggcctcggggcccagggggggtgggcgcggagccccctgcggggccgccccggccggggcgggcattacgccgaggggcccggcgtgctgtgagaccgcgtcgaccccgcgagcgagggcgtcgagggcctcgcgcatctggcgatcctccgcctccaccctaatctcttcgccacgggcaaatttggccagagcctggactctatacagaagcggttctgggtgcgtcggggtggcgggggcaaaaagggtgtccgggtgggcctgcgagcgctccagaagccactcgccgaggcgtgtatacagattggccggcggggccgcgcgaagctgcagctccaggtccgcgagttccccgtaaaaggcgtccgtctcccgaatgacatccctagccacaaggatcagcttcgccagcgccaggcgaccgatcagagagttttcgtccagcacgtgctggacgaggggcagatgggcggccacgtcggccaggctcaggcgcgtggaggccagaaagtcccccacggccgttttccggggcagcatgctcagggtaaactccagcagggcggcggccgggccggccaccccggcctgggtgtgcgtccgggccccgttctcgatgagaaaggcgaggacgcgttcaaagaaaaaaataacacagagctccagcagccccggagaagccggatacggcgaccgtaaggcgctgatggtgagccgcgaacacgcggcgacctcgcgggccagggtggcggagcacgcggtgaacttaaccgccgtggcggccacgtttgggtgggcctcgaacagctgggcgaggtctgcgcccgggggctcgggtgagcggcgagtcttcagcgcctcgagggcctgtgaggacgccggaaccatgggcccgtcgtcctcgcccgcctcggcgaccggcggcccggccgggtcggggggtgccgaggcgaggacaggctccggaacggaggcggggaccgcggccccgacgggggttttgcctttgggggtggatttcttcttggttttggcagggggggccgagcgtttcgttttctcccccgaagtcaggtcttcgacgctggaaggcggagtccaggtgggtcggcggcgcttgggaaggccggccgagtagcgtgcccggtgccgaccaaccgggacgacgcccatctccaggacccgcatgtcgtcgtcatcttcttcggccgcctctgcggcgggggtcttgggggcggagggaggcggtggtgggatcgcggagggtgggtcggcggaggggggatccgtgggtggggtaccctttagggccaccgcccatacatcgtcgggcgcccgattcgggcgcttggcctctggttttgccgacggaccggccgtcccccgggatgtctcggaggccctgtcgtcgcgacgggcccgggtcggtggcggcgactgggcggctgtgggcgggtgtggccccggcccccctcccccctcccgggggcccacgccgacgcagggctcccccaggcccgcgatctcgccccgcagggggtgcgtgatggccacgcgccgttcgctgaacgcttcgtcctgcatgtaagtctcgctggccccgtaaagatgcagagccgcggccgtcaagtccgcaggagccgcgggttccgggcccgacggcacgaaaaacaccatggctcccgcccaccgtacgtccgggcgatcgcgggtgtaatacgtcaggtatggatacatgtcccccgcccgcactttggcgatgaacgcgggggtgccctccggaaggccatgcgggtcaaaaaggtatgcggtgtcgccgtccctgaacagccccatccctagggggccaatggttaggagcgtgtacgacagggggcgcagggcccacgggccggcgaagaacgtgtgtgcggggcattgtgtctccagcaggcctgccgcgggctccccgaagaagcccacctcgccgtatacgcgcgagaagacacagcgcagtccgccgcgcgcccctgggtactcgaggaagttggggagctcgacgatcgaacacatgcgcggcggcccagggcccgcagtcgcgcgcgtccactcgcccccctcgaccaaacatccctcgatggcctccgcggacagaacgtcgcgagggcccacatcaaatatgaggctgagaaaggacagcgacgagcgcatgcacgataccgacccccccggctccaggtcgggcgcgaactggttccgagcaccggtgaccacgatgtcgcgatcccccccgcgttccatcgtggagtgcggtggggtgcccgcgatcatatgtgccctgcgggccagagacccggcctgtttatggaccggacccccggggttagtgttgtttccgccacccacgcccccgtaccatggccccggttcccctgattaggctacgagtcgcggtgatcgcttcccaaaaaccgagctgcgtttgtctgtcttggtcttccccccccccagcccgcacaccataacaccgagaacaacacacgggggtgggcggaacataataaagctttattggtaactagttaacggcaagtccgtgggtggcgcgacggtgtcctccgggatcatctcgtcgtcctcgacgggggtgttggaatgaggcgcctcctcgcggtccacctggcgtgggccgtgcccataggcctccggcttctgtgcgtccatgggcgtaggcgcggggagactgtttccggcgtcgcggacctccaggtccctgggagcctccggtccggctaacggacgaaacgcggaagcgcgaaacacgccgtcggtgacccgcaggagctcgttcatcagtaaccaatccatactcagcgtaacggccagcccctggcgagacagatccacggagtccggaaccgcggtcgtctggcccagggggccgaggctgtagtccccccaggcccctaggtcgcgacggctcgtaagcacgacgcggtcggccgcggggctttgcgggggggcgtcctcgggcgcatgcgccattacctctcggatggccgcggcgcgctggtcggccgagctgaccaagggcgccacgaccacggcgcgctccgtctgcaggcccttccacgtgtcgtggagttcctggacaaactcggccacgggctcgggtcccgcggccgcgcgcgcggcttgatagcaggccgacagacgccgccagcgcgctagaaactgacccatgaaacaaaacccggggacctggtctcccgacagcagcttcgacgcccgggcgtgaatgccggacacgacggacagaaacccgtgaatttcgcgccggaccacggccagcacgttgtcctcgtgcgacacctgggccgccagctcgtcgcacacccccaggtgcgccgtggtttcggtgatgacggaacgcaggctcgcgagggacgcgaccagcgcgcgcttggcgtcgtgatacatgctgcagtactgactcaccgcgtcccccatggcctcggggggccagggccccaggcggtcgggcgtgtccccgaccaccgcatacaggcggcgcccgtcgctctcgaaccgacactcgaaaaaggcggagagcgtgcgcatgtgcagccgcagcagcacgatggcgtcctccagttggcgaatcagggggtcggcgcgctcggcgaggtcctgcagcaccccccgggcagccagggcgtacatgctaatcaacaggaggctggtgcccacctcggggggcggggggggctgcagttggaccaggggccgcagctgctcgacggcacccctggagatcacgtacagctcccggagcagctgctctatgttgtcggccatctgcatagtggggccgaggccgccccgggcggccggttcgaggagagtgatcagcgcgcccagtttggtgcgatggccctcgaccgtggggagatagcccagcccaaagtcccgggcccaggccaacacacgcagggcgaactcgaccgggcggggaaggtaggccgcgctacacgtggccctcagcgcgtccccaaccaccagggccagaacgtaggggacgaagcccgggtcggcgaggacgttggggtgaatgccctcgagggcggggaagcggatctgggtcgccgcggccaggtggacagagggggcatggctgggctgcccgacggggagaagcgcggacagcggcgtggccggggtggtgggggtgatgtcccagtgggtctgaccatacacgtcgatccagatgagcgccgtctcgcggagaaggctgggttgaccggaactaaagcggcgctcggccgtctcaaactcccccacgagcgcccgccgcaggctcgccagatgttccgtcggcacggccggccccatgatacgcgccagcgtctggctcagaacgccccccgacaggccgaccgcctcacagagccgcccgtgcgtgtgctcgctggcgccctggacccgcctgaaagtttttacgtagttggcatagtacccgtattcccgcgccagaccaaacacgttcgaccccgcgagggcaatgcacccaaagagctgctggacttcgccgagtccgtggccggcgggcgtccgcgcggggacgcccgccgccagaaacccctccagggccgaaaggtagtgcgtgcagtgcgagggcgtgaacccagcgtcgatcagggtgttgatcaccacggagggcgaattggtattctggatcaacgtccacgtctgctgcagcagagccagcagccgctgctgggcgccggcggagggctgctccccgagctgcagcaggctggagacggcaggctggaagactgccagtgccgacgaactcaggaacggcacgtcgggatcaaacacggccacgtccgtccgcacgcgcgccattagcgtccccgggggcgcacaggccgagcgcgggctgacgcggctgagggccgtcgacacgcgcacctcctcgcggctgcgaaccatcttgttggcctccagtggcggaatcattatggccgggtcgatctcccgcacggtgtgctgaaactgcgccaacaggggcggcgggaccacagccccccgctcgggggtcgtcaggtactcgtccaccagggccaacgtaaagagggcccgtgtgaggggagtgagggtcgcgtcgtctatgcgctggaggtgcgccgagaacagcgtcacccgattactcaccagggccaagaaccggaggccctcttgcacgaacggggcggggaagagcaggctgtacgccggggtggtaaggttcgcgctgggctgccccaacgggaccggcgccagcttgagcgacgtctccccaagggcctcgatggaggtccgcgggctcatggccaagcagctcttggtgacggtttgccagcggtctatccactccacggcgcactggcggacgcggaccggccccagggccgccgcggtgcgcaggccggcggactccagcgcatgggacgtgtcggagccggtgaccgcgaggatggtgtccttgatgacctccatctcccggaaggcctggtcgggggcctcggggagagccaccaccaagcggtgtacgagcaacccggggaggttctcggccaagagcgccgtctccggaagcccgtgggcccggtggagcgcgcacaggtgttccagcagcggccgccagcatgcccgcgcgtctgccggggcgatggccgttcccgacaacagaaacgccgccatggcggcgcgcagcttggccgtggccagaaacgccgggtcgtccgccccgtttgccgtctcggccgtgggggttggcggttggcgaaggccggctaggctcgccaataggcgctgcataggtccgtccgagggcggaccggcgggtgaggtcgtgacgacgggggcctcggacgggagaccgcggtctgccatgacgcccggctcgcgtgggtgggggacagcgtagaccaacgacgagaccgggcgggaatgactgtcgtgcgctgtagggagcggcgaattatcgatcccccgcggccctccaggaaccccgcaggcgttgcgagtaccccgcgtcttcgcggggtgttatacggccacttaagtcccggcatcccgttcgcggacccaggcccgggggattgtccggatgtgcgggcagcccggacggcgtgggttgcggactttcggcggggcggcccaaatggccctttaaacgtgtgtatacggacgcgccgggccagtcggccaacacaacccaccggaggcggtagccgcgtttggctgtggggtgggtggttccgccttgcgtgagtgtcctttcgaccccccccctcccccgggtcttgctaggtcgcgatctgtggtcgcaatgaagaccaatccgctacccgcaaccccttccgtgtggggcgggagtaccgtggaactcccccccaccacacgcgataccgcggggcagggcctgcttcggcgcgtcctgcgccccccgatctctcgccgcgacggcccagtgctccccagggggtcgggaccccggagggcggccagcacgctgtggttgcttggcctggacggcacagacgcgccccctggggcgctgacccccaacgacgataccgaacaggccctggacaagatcctgcggggcaccatgcgcgggggggcggccctgatcggctccccgcgccatcatctaacccgccaagtgatcctgacggatctgtgccaacccaacgcggatcgtgccgggacgctgcttctggcgctgcggcaccccgccgacctgcctcacctggcccaccagcgcgccccgccaggccggcagaccgagcggctgggcgaggcctggggccagctgatggaggcgaccgccctggggtcggggcgagccgagagcgggtgcacgcgcgcgggcctcgtgtcgtttaacttcctggtggcggcgtgtgccgcctcgtacgacgcgcgcgacgccgccgatgcggtacgggcccacgtcacggccaactaccgcgggacgcgggtgggggcgcgcctggatcgtttttccgagtgtctgcgcgccatggttcacacgcacgtcttcccccacgaggtcatgcggtttttcggggggctggtgtcgtgggtcacccaggacgagctagcgagcgtcaccgccgtgtgcgccgggccccaggaggcggcgcacaccggccacccgggccggccccgctcggccgtgatcctcccggcgtgtgcgttcgtggacctggacgccgagctggggctggggggcccgggcgcggcgtttctgtacctggtattcacttaccgccagcgccgggaccaggagctgtgttgtgtgtacgtgatcaagagccagctccccccgcgcgggttggagccggccctggagcggctgtttgggcgcctccggatcaccaacacgattcacggcaccgaggacatgacgcccccggccccaaaccgaaaccccgacttccccctcgcgggcctggccgccaatccccaaaccccgcgttgctctgctggccaggtcacgaacccccagttcgccgacaggctgtaccgctggcagccggacctgcgggggcgccccaccgcacgcacctgtacgtacgccgcctttgcagagctcggcatgatgcccgaggatagtccccgctgcctgcaccgcaccgagcgctttggggcggtcagcgtccccgttgtcatcctggaaggcgtggtgtggcgccccggcgagtggcgggcctgcgcgtgagcgtagcaaacgccccgcccacacaacgctccgcccccaaccccttccccgctgtcactcgttgttcgttgacccggacgtccgccaaataaagccactgaaacccgaaacgcgagtgttgtaacgtcctttgggcgggaggaagccacaaaatgcaaatgggatacatggaaggaacacacccccgtgactcaggacatcggcgtgtccttttgggtttcactgaaactggcccgcgccccacccctgcgcgatgtggataaaaagccagcgcgggtggtttagggtaccacaggtgggtgctttggaaacttgtcggtcgccgtgctcctgtgagcttgcgtccctccccggtttcctttgcgctcccgccttccggacctgctctcgcctatcttctttggctctcggtgcgattcgtcaggcagtggccttgtcgaatctcgaccccaccactcgccggacccgccgacgtcccctctcgagcccgccgaaacccgccgcgtctgttgaaatggccagccgccccgccgcatcctctcccgtcgaagcgcgggccccggttgggggacaggaggccggcggccccagcgcagccacccagggggaggccgccggggcccctctcgcccgcggccaccacgtgtactgccagcgagtcaatggcgtgatggtgctttccgacaagacgcccgggtccgcgtcctaccgcatcagcgatagcaactttgtccaatgtggttccaactgcaccatgatcatagacggagacgtggtgcgcgggcgcccccaggacccgggggccgcggcatcccccgctcccttcgttgcggtgacaaacatcggagccggcagcgacggcgggaccgccgtcgtggcattcgggggaaccccacgtcgctcggcggggacgtctaccggtacccagacgaccgacgtccccaccgaggcccttgggggcccccctcctcctccccgcttcaccctgggtggcggctgttgttcctgtcgcgacacacggcgccgctctgcggtattcgggggggagggggatcccgtcggccccgcggagttcgtctcggacgaccggtcgtccgattccgactcggatgactcggaggacaccgactcggagacgctgtcacacgcctcctcggacgtgtccggcggggccacgtacgacgacgcccttgactccgattcgtcatcggatgactccctgcagatagatggccccgtgtgtcgcccgtggagcaatgacaccgcgcccctggatgtttgccccgggacccccggcccgggcgccgacgccggtggtccctcagcggtagacccacacgcaccgacgccaggggccggcgctggtcttgcggccgatcccgccgtggcccgggacgacgcggaggggctttcggacccccggccacgtctgggaacgggcacggcctaccccgtccccctggaactcacgcccgagaacgcggaggccgtggcgcgctttctgggagatgccgtgaaccgcgaacccgcgctcatgctggagtacttttgccggtgcgcccgcgaggaaaccaagcgtgtcccccccaggacattctgcagcccccctcgcctcacggaggacgactttgggcttctcaactacgcgctcgtggagatgcagcgcctgtgtctggacgttcctccggtcctgccgaacgcatacatgccctattatctcagggagtatgtgacgcggctggtcaacgggttcaagccgctggtgagccggtccgctcgcctttaccgcatcctgggggttctggtgcacctgcggatccggacccgggaggcctcctttgaggagtggctgcgatccaaggaagtggccctggactttggcctgacggaaaggcttcgcgagcacgaagcccagctggtgatcctggcccaggctctggaccattacgactgtctgatccacagcacaccgcacacgctggtcgagcgggggctgcaatcggccctgaagtatgaggagttttacctaaagcgctttggcgggcactacatggagtccgtcttccagatgtacacccgcatcgccggctttttggcctgccgggccacgcgcggcatgcgccacatcgccctggggcgagaggggtcgtggtgggaaatgttcaagttctttttccaccgcctctacgaccaccagatcgtaccgtcgacccccgccatgctgaacctggggacccgcaactactacacctccagctgctacctggtaaacccccaggccaccacaaacaaggcgaccctgcgggccatcaccagcaacgtcagcgccatcctcgcccgcaacgggggcatcgggctatgcgtgcaggcgtttaacgactccggccccgggaccgctagcgtcatacccgccctcaaggtcctcgactcgctggtggcggcgcacaacaaagagagcgcgcgtccaaccggcgcgtgcgtgtacctggagccgtggcacaccgacgtgcgggccgtgctccggatgaagggggtcctcgccggcgaagaggcccagcgctgcgacaatatcttcagcgccctctggatgccagacctgtttttcaagcgcctgattcgccacctggacggcgagaagaacgtcacatggaccctgttcgaccgggacaccagcatgtcgctcgccgactttcacggggaggagttcgagaagctctaccagcacctcgaggtcatggggttcggcgagcagatacccatccaggagctggcctatggcattgtgcgcagtgcggccacgaccgggagccccttcgtcatgttcaaagacgcggtgaaccgccactacatctacgacacccagggggcggccatcgccggctccaacctctgcaccgagatcgtccatccggcctccaagcgatccagtggggtctgcaatctgggaagcgtgaatctggcccgatgcgtctccaggcagacgtttgactttgggcggctccgcgacgccgtgcaggcgtgcgtgctgatggtgaacatcatgatcgacagcacgctacaacccacgccccagtgcacccgcggcaacgacaacctgcggtccatgggaatcggcatgcagggcctgcacacggcctgcctgaagctggggctggatctggagtctgtcgaatttcaggacctgaacaaacacatcgccgaggtgatgctgctgtcggcgatgaagaccagcaacgcgctgtgcgttcgcggggcccgtcccttcaaccactttaagcgcagcatgtatcgcgccggccgctttcactgggagcgctttccggacgcccggccgcggtacgagggcgagtgggagatgctacgccagagcatgatgaaacacggcctgcgcaacagccagtttgtcgcgctgatgcccaccgccgcctcggcgcagatctcggacgtcagcgagggctttgcccccctgttcaccaacctgttcagcaaggtgacccgggacggcgagacgctgcgccccaacacgctcctgctaaaggaactggaacgcacgtttagcgggaagcgcctcctggaggtgatggacagtctcgacgccaagcagtggtccgtggcgcaggcgctcccgtgcctggagcccacccaccccctccggcgattcaagaccgcgtttgactacgaccagaagttgctgatcgacctgtgtgcggaccgcgccccctacgtcgaccatagccaatccatgaccctgtatgtcacggagaaggcggacgggaccctcccagcctccaccctggtccgccttctggtccacgcatataagcgcggactaaaaacagggatgtactactgcaaggttcgcaaggcgaccaacagcggggtctttggcggcgacgacaacattgtctgcacgagctgcgcgctgtgaccgacaaaccccctccgcgccaggcccgccgccactgtcgtcgccgtcccacgcgctcccccgctgccatggattccgcggccccagccctctcccccgctctgacggcccatacgggccagagcgcgccggcggacctggcgatccagattccaaagtgccccgaccccgagaggtacttctacacctcccagtgtcccgacattaaccacctgcgctccctcagcatccttaaccgctggctggaaaccgagcttgttttcgtgggggacgaggaggacgtctccaagctttccgagggcgagctcagcttttaccgcttcctcttcgctttcctgtcggccgccgacgacctggttacggaaaacctgggcggcctctccggcctgtttgagcagaaggacattctccactactacgtggagcaggaatgcatcgaagtcgtacactcgcgcgtgtacaacatcatccagctggtgctttttcacaacaacgaccaggcgcgccgcgagtacgtggccggcaccatcaaccacccggccatccgcgccaaggtggactggctggaagcgcgggtgcgggaatgcgcctccgttccggaaaagttcatcctcatgatcctcatcgagggcatcttttttgccgcctcgtttgccgccatcgcctaccttcgcaccaacaaccttctgcgggtcacctgccagtcaaacgacctcatcagccgggacgaggccgtgcacacgacggcctcgtgttacatctacaacaactacctcggcgggcacgccaagcccccgcccgaccgcgtgtacgggctgttccgccaggcggtcgagatcgagatcggatttatccgatcccaggcgccgacggacagccatatcctgagcccggcggcgctggcggccatcgaaaactacgtgcgattcagcgcggatcgcctgttgggccttatccacatgaagccactgttttccgccccaccccccgacgccagctttccgctgagcctcatgtccaccgacaaacacaccaattttttcgagtgtcgcagcacctcctacgccggggcggtcgtcaacgatctgtgagggtcgcggcgcgcttctacccgtgtttgcccataataaacctctgaaccaaactttgggtctcattgtgattcttgtcagggacgcgggggtgggagaggataaaaggcggcgcaaaaagcagtaaccaggtccgtccagattctgagggcataggataccataattttattggtgggtcgtttgttcggggacaagcgcgctcgtctgacgtttgggctactcgtcccagaatttggccaggacgtccttgtagaacgcgggtgggggggcctgggtccgcagctgctccagaaacctgtcggcgatatcaggggccgtgatatgccgggtcacaatagatcgcgccaggttttcgtcgcggatgtcctggtagataggcaggcgtttcagaagagtccacggcccccgctccttggggccgataagcgatatgacgtacttaatgtagcggtgttccaccagctcggtgatggtcatgggatcggggagccagtccagggactctggggcgtcgtggatgacgtggcgtcgccggctggccacataactgcggtgctcttccagcagctgcgcgttcgggacctggacgagctcgggcggggtgagtatctccgaggaggacgacctggggccggggtggcccccggtaacgtcccggggatccagggggaggtcctcgtcgtcttcgtatccgccggcgatctgttgggttagaatttcggtccacgagacgcgcatctcggtgccgccggcggccggcggcaaagggggcctggtttccgtggagcgcgagctggtgtgttcccggcggatggcccgccgggtctgagagcgactcgggggggtccagtgacattcgcgcagcacatcctccacggaggcgtaggtgttattgggatggaggtcggtgtggcagcggacaaagagggccaggaactgggggtagctcatcttaaagtactttagtatatcgcgacagttgatcgtgggaatgtagcaggcgctaatatccaacacaatatcacagcccatcaacaggaggtcagtgtctgtggtgtacacgtacgcgaccgtgttggtgtgatagaggttggcgcaggcatcgtccgcctccagctgacccgagttaatgtaggcgtaccccagggcccggagaacgcgaatacagaacagatgcgccagacgcagggccggcttcgagggcgcggcggacggcagcgcggctccggacccggccgtcccccgggtccccgaggccagagaggtgccgcgccggcgcatgttggaaaaggcagagctgggtctggagtcggtgatgggggaaggcggtggagaggcgtccacgtcactggcctcctcgtccgtccggcattgggccgtcgtgcgggccaggatggccttggctccaaacacaaccggctccatacaattgaccccgcgatcggtaacgaagatggggaaaagggacttttgggtaaacacctttaataagcgacagaggcagtgtagcgtaatggcctcgcggtcgtaactggggtatcggcgctgatatttgaccaccaacgtgtacatgacgttccacaggtccacggcgatgggggtgaagtacccggccggggccccaaggccctggcgcttgaccagatggtgtgtgtgggcaaacttcatcatcccgaacaaacccatgtcaggtcgattgtaactgcggatcggcctaactaaggcgtggttggtgcgacggtccgggacacccgagcctgtctctctgtgtatggtgacccagacaacaacaccgacacaagaggacaataatccgttaggggacgctctttataatttcgatggcccaactccacgcggattggtgcagcaccctgcatgcgccggtgtgggccaaacttccccccgctcattgcctcttccaaaagggtgtggcctaacgagctgggggcgtatttaatcaggctagcgcggcgggcctgccgtagtttctggctcggtgagcgacggtccggttgcttgggtcccctggctgccagcaaaaccccaccctcgcagcggcatacgccccctccgcgtcccgcacccgagaccccggcccggctgccctcaccaccgaagcccacctcgtcactgtggggtgttcccagcccgcattgggatgacggattcccctggcggtgtggcccccgcctcccccgtggaggacgcgtcggacgcgtccctcgggcagccggaggagggggcgccctgccaggtggtcctgcagggcgccgaacttaatggaatcctacaggcgtttgccccgctgcgcacgagccttctggactcgcttctggttatgggcgaccggggcatccttatccataacacgatctttggggagcaggtgttcctgcccctggaacactcgcaattcagtcggtatcgctggcgcggacccacggcggcgttcctgtctctcgtggaccagaagcgctccctcctgagcgtgtttcgcgccaaccagtacccggacctacgtcgggtggagttggcgatcacgggccaggccccgtttcgcacgctggttcagcgcatatggacgacgacgtccgacggcgaggccgttgagctagccagcgagacgctgatgaagcgcgaactgacgagctttgtggtgctggttccccagggaacccccgacgttcagttgcgcctgacgaggccgcagctcaccaaggtccttaacgcgaccggggccgatagtgccacgcccaccacgttcgagctcggggttaacggcaaattttccgtgttcaccacgagtacctgcgtcacatttgctgcccgcgaggagggcgtgtcgtccagcaccagcacccaggtccagatcctgtccaacgcgctcaccaaggcgggccaggcggccgccaacgccaagacggtgtacggggaaaatacccatcgcaccttctctgtggtcgtcgacgattgcagcatgcgggcggtgctccggcgactgcaggtcgccgggggcaccctcaagttcttcctcacgacccccgtccccagtctgtgcgtcaccgccaccggtcccaacgcggtatcggcggtatttctcctgaaaccccagaagatttgcctggactggctgggtcatagccaggggtctccttcagccgggagctcggcctcccgggcctctgggagcgagccaacagacagccaggactccgcgtcggacgcggtcagccacggcgatccggaagacctcgatggcgctgcccgggcgggagaggcgggggcctcgcacgcctgtccgatgccgtcgtcgaccacgcgggtcactcccacgaccaagcgggggcgctcggggggcgaggatgcgcgcgcggacacggccctaaagaaacctaagacggggtcgcccaccgcacccccgcccacagatccagtccccctggacacggaggacgactccgatgcggcggacgggacggcggcccgtcccgccgctccagacgcccggagcggaagccgttacgcgtgttactttcgcgacctcccgaccggagaagcaagccccggcgccttctccgccttccgggggggcccccaaaccccgtatggttttggattcccctgacggggcggggccttggcggccgcccaactctcgcaccatcccgggttaatgtaaataaacttggtattgcccaacactctcccgcgtgtcgcgtgtggttcatgtgtgtgcctggcgtcccccaccctcgggttcgtgtatttcctttccctgtccttataaaagccgtatgtggggcgctgacggaaccaccccgcgtgccatcacggccaaggcgcgggatgctccgcaacgacagccaccgggccgcgtccccggaggacggccagggacgggtcgacgacggacggccacacctcgcgtgcgtgggggccctggcgcgggggttcatgcatatctggcttcaggccgccacgctgggttttgcgggatcggtcgttatgtcgcgcgggccgtacgcgaatgccgcgtctggggcgttcgccgtcgggtgcgccgtgctgggctttatgcgcgcaccccctcccctcgcgcggcccaccgcgcggatatacgcctggctcaaactggcggccggtggagcggcccttgttctgtggagtctcggggagcccggaacgcagccgggggccccgggcccggccacccagtgcctggcgctgggcgccgcctatgcggcgctcctggtgctcgccgatgacgtctatccgctctttctcctcgccccggggcccctgttcgtcggcaccctggggatggtcgtcggcgggctgacgatcggaggcagcgcgcgctactggtggatcggtgggcccgccgcggccgccttggccgcggcggtgttggcgggcccgggggcgaccaccgccagggactgcttctccagggcgtgccccgaccaccgccgcgtctgcgtcatcgtcgcaggcgagtctgtttcccgccgccccccggaggacccagagcgacccggggaccccgggccaccgtcccccccgacaccccaacgatcccaggggccgccggccgatgaggtcgcaccggccggggtagcgcggcccgaaaacgtctgggtgcccgtggtcacctttctgggggcgggcgcgctcgccgtcaagacggtgcgagaacatgcccgggaaacgccgggcccgggcctgccgctgtggccccaggtgtttctcggaggccatgtggcggtggccctgacggagctgtgtcaggcgcttatgccctgggaccttacggacccgctgctgtttgttcacgccggactgcaggtcatcaacctcgggttggtgtttcggttttccgaggttgtcgtgtatgcggcgctagggggtgccgtgtggatttcgttggcgcaggtgctggggctccggcgtcgcctgcacaggaaggaccccggggacggggcccggttggcggcgacgcttcggggcctcttcttctccgtgtacgcgctggggtttggggtgggggcgctgctgtgccctccggggtcaacgggcgggtggtcgggcgattgatatatttttcaataaaaggcattagtcccgaagaccgccggtgtgtgatgatttcgccataacacccaaaccccggatggggcccgggtataaattccggaaggggacacgggctaccctcactaccgagggcgcttggtcgggaggccgcatcgaacgcacacccccatccggtggtccgtgtggaggtcgtttttcagtgcccggtctcgctttgccgggaacgctagccgatccctcgcgagggggaggcgtcgggcatggccccggggcgggtgggccttgccgtggtcctgtggagcctgttgtggctcggggcgggggtggccgggggctcggaaactgcctccaccgggcccacgatcaccgcgggagcggtgacgaacgcgagcgaggcccccacatcggggtcccccgggtcagccgccagcccggaagtcacccccacatcgaccccaaaccccaacaatgtcacacaaaacaaaaccacccccaccgagccggccagccccccaacaacccccaagcccacctccacgcccaaaagcccccccacgtccacccccgaccccaaacccaagaacaacaccacccccgccaagtcgggccgccccactaaaccccccgggcccgtgtggtgcgaccgccgcgacccattggcccggtacggctcgcgggtgcagatccgatgccggtttcggaattccacccgcatggagttccgcctccagatatggcgttactccatgggtccgtcccccccaatcgctccggctcccgacctagaggaggtcctgacgaacatcaccgccccacccgggggactcctggtgtacgacagcgcccccaacctgacggacccccacgtgctctgggcggagggggccggcccgggcgccgaccctccgttgtattctgtcaccgggccgctgccgacccagcggctgattatcggcgaggtgacgcccgcgacccagggaatgtattacttggcctggggccggatggacagcccgcacgagtacgggacgtgggtgcgcgtccgcatgttccgccccccgtctctgaccctccagccccacgcggtgatggagggtcagccgttcaaggcgacgtgcacggccgccgcctactacccgcgtaaccccgtggagtttgtctggttcgaggacgaccgccaggtgtttaacccgggccagatcgacacgcagacgcacgagcaccccgacgggttcaccacagtctctaccgtgacctccgaggctgtcggcggccaggtccccccgcggaccttcacctgccagatgacgtggcaccgcgactccgtgatgttctcgcgacgcaatgccaccgggctggccctggtgctgccgcggccaaccatcaccatggaatttggggtccggcatgtggtctgcacggccggctgcgtccccgagggcgtgacgtttgcctggttcctgggggacgacccctcaccggcggctaagtcggccgttacggcccaggagtcgtgcgaccaccccgggctggctacggtccggtccaccctgcccatttcgtacgactacagcgagtacatctgtcggttgaccggatatccggccgggattcccgttctagagcaccacggcagtcaccagcccccacccagggaccccaccgagcggcaggtgatcgaggcgatcgagtgggtggggattggaatcggggttctcgcggcgggggtcctggtcgtaacggcaatcgtgtacgtcgtccgcacatcacagtcgcggcagcgtcatcggcggtaacgcgagacccccccgttacctttttaatatctatatagtttggtccccctctatcccgcccaccgctgggcgctataaagccgccaccctctcttccctcaggtcatccttggtcgatcccgaacgacacacggcgtggagcaaaacgcctccccctgagccgctttcctaccaacacaacggcatgcctctgcgggcatcggaacacgcctaccggcccctgggccccgggacaccccccatgcgggctcggctccccgccgcggcctgggttggcgtcgggaccatcatcgggggagttgtgatcattgccgcgttggtcctcgtgccctcgcgggcctcgtgggcactttccccatgcgacagcggatggcacgagttcaacctcgggtgcatatcctgggatccgacccccatggagcacgagcaggcggtcggcggctgtagcgccccggcgaccctgatcccccgcgcggctgccaaacagctggccgccgtcgcacgcgtccagtcggcaagatcctcgggctactggtgggtgagcggagacggcattcgggcctgcctgcggctcgtcgacggcgtcggcggtattgaccagttttgcgaggagcccgcccttcgcatatgctactatccccgcagtcccgggggctttgttcagtttgtaacttcgacccgcaacgcgctggggctgccgtgaggcgcgtgtactgcggtctgtctcgtctcctcttctccccttccctccccctccgcatcccaggatcacaccggccaacgagggttgggggggtccggcacggacccaaaataataaacacacaatcacgtgcgataaaaagaacacgcggtcccctgtggtgtttttggttatttttattaaatctcgtcgacaaacagggggaaaggggcgtggtctagcgacggcagcacgggcggaggcgttcaccggctccggcgtccttcgcgtttaagcttggtcaggagggcgctcagggcggcgacgttggtcgggccgtcgttggtcagggcgttggctcgatggcgggcgaggacgggcgaggggctcaacggcgggggcgggggtccggtgcggcccgggggggaaaatagggcggatcccccccagtcgtacaggggattttccgcctcaatgtacggggaggccggcgctgcattcgccgtgttcacgcagacgttttcgtagacccgcatccatggtatttcctcgtagacacgccccccgtcctcgctcacggtctcgtatattgactcgtcgtcctcgtagggggcgtgccgttcgcgggccgaggcggcgtgggtggctttgcggcgggcgtcgtcgtcgtcgtcgtcggccgtcagatacgtggcttccatctggtcgggttctccctccggggcgggtccccacacccgtggccgatcgaggctccccagagacgcgcgccggacaagaagggggcacgtcgccgccggcggtcgcctgtcgggtcccgcgacgttacgggccgggaggcgcgggggcacctcccccatgtgcgtgtaatacgtggccggctgtgcggccgcagcggggggctcggcgaccgggtcgtccgcatccggaagcgggggccccgcgccgtccgcacggcgcctccggaaccgccgggtggacggcgcgggggtcgagtgtaggcgaggtcgggggaggggcgggggctcgttgtcgcgccgcgcccgctgaatcttttcccgacaggtcccaccccccgcgcgatgcccccccgggccgcgggccatgtcgtccgggggaggccccgcggaccacgtcgtccggcgagacgccacgagccgcaggatggactcgtagtggagcgacggcgccccgctgcggagcagatccgcggccagggcggccccgaaccaagccttgatgctcaactccatccgggcccagctgggggcggtcatcgtggggaacaggggggcggtggtccgacagaaacgctcctggctgtccaccgcggcccgcagatactcgttgttcaggctgtcggtggcccagacgccgtacccggtgagggtcgcgttgatgatatactgggcgtggtgatggacgatcgacagaacctccaccgtggataccacggtatccacggtcccgtacgtaccgccgctccgcttgccggtctgccacaggttggctaggcacgtcaggtggcccaggacgtcgctgaccgccgccctgagcgccatgcactgcatggagccggtcgtgccgctgggaccccggtccagatggcgcgcgaacgtttccgcgggcgcctccgggctgccgccgagcgggaggaaccggcgattggagggactcagccggtgacatacgtgcttgtccgtcgtccacagcatccaggacgcccaccggtacagcacggagacgtaggccaggagctcgttgagccgcagtgcggtgtcggtgctggggcggcttgggtccgccgggcgcataaagaacatgtactgctgaatccgatggagggcgtcgcgcaggccggccacggtggcggcgtacttggccgccgcggccccgctcttgaacggggtgcgcgccagcagctttggcgccagggtgggccgcagcagcacgtgaaggctggggtcgcagtcgcccacggggtcctcggggacgtccaggccgctgggcaccaccgtctgcaggtacttccagtactgcgtgaggatggcgcggctcaactggccgccgggcagctccacctcgcccagcgcctgggtggcggccgaagcgtagtgccggatgtactcgtagtgcgggtcgctggcgagcccgtccacgatcaaactctcgggaaccgtgttgtgttgccgcgcggccaaccggacgctgcgatcggtgcaggtcagaaacgccggctgcgcgtcgtcggagcgctgccgcaaggcgcccacggccgcgctaaggagcccctccggggtggggagcagacacccgccgaagatgcgccgctcgggaacgcccgcgttgtcgccgcggatcaggttggcaggcgtcaggcaccgcgccagccgcagggagctcgcgccgcgcgtccggcgctgcatggtgacgcccgttcggtcgggacccgccggtcggagttatgccgcgtccagggccatcggggcgctttttatcgggaggagcttatgggcgtggcgggcctcccagcccggtcgcgcgcctccccgacacgtgcgcccgcagggcggcggccccctcgtctcccatcagcagtttcctaaactgggacatgatgtccaccacgcggacccgcgggcccaacacggacccgccgcttacgggggcgggggggaagggctccaggtccttgagcagaaaggcggggtctgccgtcccggacacgggggcccggggcgcggaggaggcggggcgcagatccacgtgctccgcggccgcgcggacgtccgcccagaacttggcgggggtggtgcgcgcgtacaggggctgggtcgctcggaggacacacgcgtagcgcaggggggtgtacgtgcccacctcgggggccgtgaatcccccgtcaaacgcggccagtgtcacgcacgccaccacggtgtcggcaaagcccagcagccgctgcaggacgagcccggcggccagaatggcgcgcgtggtcgcagcgtcgtcccggcgccggtgcgcgtccccgcacgcccgggcgtactttaaggtcactgtcgccagggccgtgtgcagcgcgtacaccgcagcgcccagcacggcgttgagcccgctgttggcgagcagccggcgcgctgcggtgtcgcccagcgcctcgtgctcggcccccacgaccgcggggcttcccaggggcagggcgcgaaacagctcctcccgcgccacgtccgcaaaggcggggtggtgcacgtgcgggtgcaggcgcgcccccacgaccaccgagagccactggaccgtctgctccgccatcaccgccaacacatccagcacgcgccccaggaaggcggcctcccgcgtcaaaacgcaccggacggcgtcgggattgaagcgggcgagcagggccccggtggccaggtacgtcatgcggccggcatagcgggcggccacgcgacagtcgcggtccagcagcgcgcgcaccccgggccagtacagcagggaccccagcgagctgcgaaacaccgcggcgtcggggccggattggggggacactaacccccccgcgctcagtaacggcacggccgcggccccgacgggacgcaacgccgtgaggctcgcgaactgccgcctcagctcggcagccctgtcgtccaggtccgacccgcgcgcctctgcgtgaaggcgcgtcccgcacacccacccgttgatggccagccgcacgacggcatccgccaaaaagctcatcgcctgggcggggctggtttttgttcgacgatccgtcaggtcaagaatcccatcgcccgtgatataccaggccaacgcctcgccctgctgcagggtttggcggaaaaacaccgcggggttgtcgggggaggcgaagtgcatgacccccacgcgcgataacccgaacgcgctatccggacacgggtaaaacccggccggatgccccagggctagggcggagcgcacggactcgtcccacacggcaacctgaggggccagtcgatccaacgggaatgccgcccggagctccgggcccggcacgcgtccctccagaacctccaccttgggcggggaacgggccccgccgccgtcctccggcccgacgtcttccgggtagtcgtcctcctcgtactgcagttcctctaggaacagcggcgacggcgccacccgcgaaccgccgacccgccccaaaatagcccgcgcgtcgacgggacccaggtatcccccctgccgggcctgcggaggaccgcggggaacctcatcatcatcgtccaggcgaccgcgcaccgactggctacgggccgcatcgggcccggggcgctgccgggacgctcggcgatgggatgagggcggggcttccgacgcgcgccgtcgtcgggctcgcgggccttcccgtcgacggcgcacgggcggctcgtcgcccgccatctcctccagagcctctagctcgctgtcgtcatccccgcggaacaccgcacgcaggtaccccatgaaccccaccccatcgcccgctggctcgtccgccacgggcgaggcgcgggggcgggtggatgcgcgcctcctgcgccccgcgggttcgcgagccgacatggtggcgatagacgcgggttatcggatgtccgctaccccccaaaaaagaaaaagaccccacagcgcggatggaggtcggggtaggtgccgccggaccccctcgcgatgggaatggacgggagcgacggggccggcgcaaaaaacgcagtatctcccgcgaaggctacccgccgccccagcccccggccaaatgcggaaacggtcccgcgctctcgcctttatacgcgggccgccctgcgacacaatcacccgtccgtggtttcgaatctacacgacaggcccgcagacgcggctaacacacacgccggcaacccagaccccagtgggttggttgcgcggtcccgtctcctggctagttctttcccccaccaccaaataatcagacgacaaccgcaggtttttgtaatgtatgtgctcgtgtttattgtggatacgaaccggggacgggaggggaaaacccagacgggggatgcgggtccggtcgcgccccctatgggtggggttgatacgggaaagacgatatcgggcttttgatgcgatcgtccccgcccgcccagagagtgtgggacgcccgacggcgcgggaagagaaaaacccccaaacgcgttagaggaccggacggaccttatggggggaagtgggcagcgggaaccccgtccgttcccgaggaatgacagcccgtggtcgccaccccgcatttaagcaacccgcacgggccgccccgtacctcgtgacttccccccacattggctcctgtcacgtgaaggcaaaccgagggcggctgtccaacccaccccccgccacccagtcacggtccccgtcggattgggaaacaaaggcacgcaacgccaacaccgaatgaacccctgttggtgctttattgtctgggtacggaagtttttcactcgacgggccgtctggggcgagaagcggagcgggctggggctcgaggtcgctcggtggggcgcgacgccgcagaacgccctcgagtcgccgtggccgcgtcgacgtcctgcaccacgtctggattcaccaactcgttggcgcgctgaatcaggtttttgccctcgcagaccgtcacgcggatggtggtgatgccaaggagttcgttgaggtcttcgtctgtgcgcggacgcgacatgtcccagagctggaccgccgccatccgggcatgcatggccgccaggcgcccaaccgcggcgcagaagacgcgcttgttaaagccggccacccggggggtccatggcgcgtcggggtttgggggggcggtgctaaagtgcagctttctggccagcccctgcgcgggtgtcttggatcgggttggcgccgtcgacgcgggggcgtctgggagtgcggcggattctggctgggccgatttcctgccgcgggtggtctccgccgccggggccgcgggggccttagtcgccacccgctgggttcggggggcccggggggcggtggtgggtgtgcgtccggcccctccggacccagcgggcggcggaggcgcccgcgcaggccccggggcggacaaaaccgccccggaaacgggacgccgcgtccgggggacctccgggtgttcgtcgtcttcggatgacgagcccccgtagagggcataatccgactcgtcgtactggacgaaacggacctcgccccttgggcgcgcgcgtgtctgtagggcgccacggcgggaggtgtcaggcggactatcgggactcgccatacatgaagacggggtgtagtacagatcctcgtactcatcgcgcggaacctcccgcggacccgacttcacggagcggcgagaggtcatggttccacgaacacgctagggtcggatgcgcggacaattaggcctgggttcggacggcgggggtggtgcaggtgtggagaggtcgagcgataggggcggcccgggagagaagagagggtccgcaaaacccactggggatgcgtgagtggccctctgtgggcggtgggggagagtcttataggaagtgcatataaccacaacccatgggtctaaccaatccccaggggccaagaaacagacacgccccaaacggtctcggtttccgcgaggaaggggaagtcctgggacaccctccacccccacccctcaccccacacagggcgggttcaggcgtgcccggcagccagtagcctctggcagatctgacagacgtgtgcgataatacacacgcccatcgaggccatgcctacataaaagggcaccagggcccccggggcagacatttggccagcgttttgggtctcgcaccgcgcgcccccgatcccatcgcgcccgccctcctcgccgggcggctccccgtgcgggcccgcgtctcccgccgctaaggcgacgagcaagacaaacaacaggcccgcccgacagacccttctgggggggcccatcgtccctaacaggaagatgagtcagtggggatccggggcgatccttgtccagccggacagcttgggtcgggggtacgatggcgactggcacacggccgtcgctactcgcgggggcggagtcgtgcaactgaacctggtcaacaggcgcgcggtggcttttatgccgaaggtcagcggggactccggatgggccgtcgggcgcgtctctctggacctgcgaatggctatgccggctgacttttgtgcgattattcacgcccccgcgctatccagcccagggcaccacgtaatactgggtcttatcgactcggggtaccgcggaaccgttatggccgtggtcgtagcgcctaaaaggacgcgggaatttgcccccgggaccctgcgggtcgacgtgacgttcctggacatcctggcgacccccccggccctcaccgagccgatttccctgcggcagttcccgcaactggcgcccccccctccaaccggggccgggatacgcgcagatccttggttggagggggcgctcggggacccaagcgtgactcctgccctaccggcgcgacgccgagggcggtccctcgtctatgccggcgagctgacgccggttcagacggaacacggggacggcgtacgagaagccatcgccttccttccaaaacgcgaggaggatgccggtttcgacattgtcgtccgtcgcccggtcaccgtcccggcaaacggcaccacggtcgtgcagccatccctccgcatgctccacgcggacgccgggcccgcggcctgctatgtgctggggcggtcgtcgctcaacgcccgcggcctcctggtcgttcctacgcgctggctccccgggcacgtatgtgcgtttgttgtttacaaccttacgggggttcctgtgaccctcgaggccggcgccaaggtcgcccagctcctggttgcgggggcggacgctcttccttggatccccccggacaactttcacgggaccaaagcgcttcgaaactaccccaggggtgttccggactcaaccgccgaacccaggaacccgccgctcctggtgtttacgaacgagtttgacgcggaggcccccccgagcgagcgcgggaccgggggttttggctctaccggtatttagcccatagcttggggttcgttccgggcaataaaaaacgtttgtatctcatctttcctgtgtgtagttgtttctgttggatgcctgtgggtctatcacacccgcccctccatcccacaaacacagaacacacgggttggatgaaaacacgcatttattgacccaaaacacacggagctgctcgagatgggccagggcgaggtgcggttggggaggctgtaggtctgggaacggacacgcggggacacgattccggtttggggtccgggagggcgtcgccgtttcgggcggcaggcgccagcgtaacctccgggggcggcgtgtgggggtgccccaaggagggcgcctcggtcaccccaagcccccccgagcgggttcccccggcaaccccgaaggcggagaggccaagggcccgttcggcgatggccacatcctccatgaccacgtcgctctcggccatgctccgaatagcctgggagacgagcacatccgcggacttgtcagccgcccccacggacatgtacatctgcaggatggtggccatacacgtgtccgccaggcgccgcatcttgtcctgatgggccgccacggccccgtcgatcgtgggggcctcgagcccggggtggtggcgcgccagtcgttctaggttcaccatgcaggcgtggtacgtgcgggccaaggcgcgggccttcacgaggcgtcgggtgtcgtccagggaccccagggcgtcatcgagcgtgatgggggcgggaagtagcgcgttaacgaccaccagggcctcctgcagccgcggctccgcctccgagggcggaacggccgcgcggatcatctcatattgttcctcggggcgcgctccccagccacatatagccccgagaagagaagccatcgcgggcgggtactggcccttgggcgcgcggacgcaatggggcaggaagacgggaaccgcggggagaggcgggcggccgggactcccgtggaggtgaccgcgctttatgcgaccgacgggtgcgttattacctcttcgatcgccctcctcacaaactctctactgggggccgagccggtttatatattcagctacgacgcatacacgcacgatggccgtgccgacgggcccacggagcaagacaggttcgaagagagtcgggcgctctaccaagcgtcgggcgggctaaatggcgactccttccgagtaaccttttgtttattggggacggaagtgggtgggacccaccaggcccgcgggcgaacccgacccatgttcgtctgtcgcttcgagcgagcggacgacgtcgccgcgctacaggacgccctggcgcacgggaccccgctacaaccggaccacatcgccgccaccctggacgcggaggccacgttcgcgctgcatgcgaacatgatcctggctctcaccgtggccgtcaacaacgccagcccccgcaccggacgcgacgccgccgcggcgcagtatgatcagggcgcgtccctacgctcgctcgtggggcgcacgtccctgggacaacgcggccttaccacgctatacgtccaccacgaggcgcgcgtgctggccgcgtaccgcagggcgtattatggaagcgcgcagagtcccttctggtttcttagcaaattcgggcctgacgaaaaaagcctggtgctcaccactcggtactacctgcttcaggcccagcgtctggggggcgcgggggccacgtacgacctgcaggccatcaaggacatctgcgccacctacgcgattccccacgccccccgccccgacaccgtcagcgccgcgtccctgacctcgtttgccgccatcacgcggttctgttgcacgagccagtacgcccgcggggccgcggcggccgggtttccgctttacgtggagcgccgtattgcggccgacgtccgcgagaccagtgcgctggagaagttcataacccacgatcgcagttgcctgcgcgtgtccgaccgtgaattcattacgtacatttacctggcccattttgagtgtttcagccccccgcgcctagccacgcatcttcgggccgtgacgacccaggaccccaaccccgcggccaacacggagcagccctcgcccctgggcagggaggccgtggaacaatttttttgccacgtgcgcgcccaactgaatatcggggagtacgtcaaacacaacgtgaccccccgggagaccgtcctggatggcgatacggccaaggcctacctgcgcgctcgcacgtacgcgcccggggccctgacgcccgcccccgcgtattgcggggccgtggactccgccaccaaaatgatggggcgtttggcggacgccgaaaagctcctggtcccccgcgggtggcccgcgtttgcgcccgccagtcccggggaggatacggcgggcggcacgccgcccccacagacctgcggaatcgtcaagcgcctcctgagactggccgccacggaacaacaggacaccacgcccccggcgatcgcggcgcttatccgtaatgcggcggtgcagactcccctgcccgtctaccggatatccatggtccccacgggacaggcatttgccgcgctggcctgggacgactgggcccgcataacgcgggacgctcgcctggccgaagcggtcgtgtccgccgaagcggcggcgcaccccgaccacggcgcgctgggcaggcggctcacggatcgcatccgcgcccagggccccgtgatgccccctggcggcctggatgccggggggcagatgtacgtgaatcgcaacgagatatttaacggcgcgctggcaatcacaaacatcatcctggatctcgacatcgccctgaaggagcccgtcccctttcgccggctccacgaggccctgggccactttaggcgcggggctctggcggcggttcagctcctgtttcccgcggcccgcgtggaccccgacgcatatccctgttattttttcaaaagcgcatgtcggcccggcccggcgtccgtgggttccggcagcggactcggcaacgacgacgacggggactggtttccctgctacgacgacgccggtgatgaggagtgggcggaggacccgggcgccatggacacatcccacgatcccccggacgacgaggttgcctactttgacctgtgccacgaagtcggccccacggcggaacctcgcgaaacggattcgcccgtgtgttcctgcaccgacaagatcggactgcgggtgtgcatgcccgtccccgccccgtacgtcgtccacggttctctaacgatgcggggggtggcacgggtcatccagcaggcggtgctgttggaccgagattttgtggaggccatcgggagctacgtaaaaaacttcctgttgatcgatacgggggtgtacgcccacggccacagcctgcgtttgccgtattttgccaaaatcgcccccgacgggcctgcgtgcggaaggctgctgccagtgtttgtgatcccccccgcctgcaaagacgttccggcgtttgtcgccgcgcacgccgacccgcggcgcttccattttcacgccccgcccacctatctcgcttccccccgggagatccgtgtcctgcacagcctgggtggggactatgtgagcttctttgaaaggaaggcgtcccgcaacgcgctggaacactttgggcgacgcgagaccctgacggaggtcctgggtcggtacaacgtacagccggatgcgggggggaccgtcgaggggttcgcatcggaactgctggggcggatagtcgcgtgcatcgaaacccactttcccgaacacgccggcgaatatcaggccgtatccgtccggcgggccgtcagtaaggacgactgggtcctcctacagctagtccccgttcgcggtaccctgcagcaaagcctgtcgtgtctgcgctttaagcacggccgggcgagtcgcgccacggcgcggacattcgtcgcgctgagcgtcggggccaacaaccgcctgtgcgtgtccttgtgtcagcagtgctttgccgccaaatgcgacagcaaccgcctgcacacgctgtttaccattgacgccggcacgccatgctcgccgtccgttccctgcagcacctctcaaccgtcgtcttgataacggcgtacggcctcgtgctcgtgtggtacaccgtcttcggtgccagtccgctgcaccgatgtatttacgcggtacgccccaccggcaccaacaacgacaccgccctcgtgtggatgaaaatgaaccagaccctattgtttctgggggccccgacgcacccccccaacgggggctggcgcaaccacgcccatatctgctacgccaatcttatcgcgggtagggtcgtgcccttccaggtcccacccgacgccacgaatcgtcggatcatgaacgtccacgaggcagttaactgtctggagaccctatggtacacacgggtgcgtctggtggtcgtagggtggttcctgtatctggcgttcgtcgccctccaccaacgccgatgtatgtttggtgtcgtgagtcccgcccacaagatggtggccccggccacctacctcttgaactacgcaggccgcatcgtatcgagcgtgttcctgcagtacccctacacgaaaattacccgcctgctctgcgagctgtcggtccagcggcaaaacctggttcagttgtttgagacggacccggtcaccttcttgtaccaccgccccgccatcggggtcatcgtaggctgcgagttgatgctacgctttgtggccgtgggtctcatcgtcggcaccgctttcatatcccggggggcatgtgcgatcacataccccctgtttctgaccatcaccacctggtgttttgtctccaccatcggcctgacagagctgtattgtattctgcggcggggcccggcccccaagaacgcagacaaggccgccgccccggggcgatccaaggggctgtcgggcgtctgcgggcgctgttgttccatcatcctgtcgggcatcgcaatgcgattgtgttatatcgccgtggtggccggggtggtgctcgtggcgcttcactacgagcaggagatccagaggcgcctgtttgatgtatgacgtcacatccaggccggcggaaaccggaacggcatatgcaaactggaaactgtcctgtcttggggcccacccacccgacgcgtcatatgtaaatgaaaatcgttcccccgaggccatgtgtagcctggatcccaacgaccccgcccatgggtcccaattggccgtcccgttaccaagaccaacccagccagcgtatccacccccgcccgggtccccgcggaagcggaacggtgtatgtgatatgctaattaaatacatgccacgtacttatggtgtctgattggtccttgtctgtgccggaggtggggcgggggccccgcccggggggcggaactaggaggggtttgggagagccggccccggcaccacgggtataaggacatccaccacccggccggtggtggtgtgcagccgtgttccaaccacggtcacgcttcggtgcctctccccgattcgggcccggtcgcttgctaccggtgcgccaccaccagaggccatatccgacaccccagccccgacggcagccgacagcccggtcgtacaataaaaacaaaacatttcaaacaaatcgccccacgtgttgtccttctttgctcatggccggcggggcgtgggtcacggcagatggcgggggtgggcccggcgtacggcctgggtgggcggagggaactaacccaacgtataaatccgtccccgctccaaggccggtgtcatagtgcccttaggagcttcccgcccgggcgcatccccccttttgcactatgacagcgacccccctcaccaacctgttcttacgggccccggacataacccacgtggcccccccttactgcctcaacgccacctggcaggccgaaacggccatgcacaccagcaaaacggactccgcttgcgtggccgtgcggagttacctggtccgcgcctcctgtgagaccagcggcacaatccactgctttttctttgcggtatacaaggacacccaccatacccctccgctgattaccgagctccgcaactttgcggacctggttaaccacccgccggtcctacgcgaactggaggataagcgcggggtgcggctgcggtgtgcgcggccgtttagcgtcgggacgattaaggacgtctctgggtccggcgcgtcctcggcgggagagtacacgataaacgggatcgtgtaccactgccactgtcggtatccgttctcaaaaacatgctggatgggggcctccgcggccctacagcacctgcgctccatcagctccagcggcatggccgcccgcgcggcagagcatcgacgcgtcaagattaaaattaaggcgtgatctccaaccccccatgaatgtgtgtaaccccccccaaaaaaataaagagccgtaacccaaccaaaccaggcgtggtgtgagtttgtggacccaaagccctcagagacaatgcgacaggccagtatggaccgtgatacttttatttattaactcacaggggcgcttaccgccacaggaataccagaataatgaccaccacaatcgcgaccaccccaaatacagcatggcgccacaccacgccacaacagccctgtcgccggtatggggcatgatcagacgagccgcgcgccgcgcgttgggccctgtacagctcgcgcgaattgaccctaggaggccgccacgcgcccgagttttgcgttcgtcgctggtcgtcgggcgccaaagccccggacggctgttcggtcgaacgaacggccacgacagtggcataggttggggggtggtccgacatagcctcggcgtacgtcgggaggcccgacaagaggtcccttgtgatgtcgggtggggccacaagcctggtttccggaagaaacaggggggttgccaataacccgccagggccaaaactccggcgctgcgcacgtcgttcggcgcggcgccgggcgcgccgagcggctcgctgggcggcttggcgtgagcggccccgctccgacgcctcgccctctccggaggaggttggcggaattggcacggacgacaggggcccagcagagtacggtggaggtgggtccgtgggggtgtccagatcaataacgacaaacggcccctcgttcctaccagacaagctatcgtaggggggcgggggatcagcaaacgcgttccccgcgctccatagacccgcgtcgggttgcgccgcctccgaagccatggatgcgccccaaagccacgactcccgcgcgctaggtccttggggtaagggaaaaggccctactccccatccaagccagccaagttaacgggctacgccttcggggatgggactggcaccccggcggattttgttgggctggtacgcgtcgcccaaccgagggccgcgtccacgggacgcgccttttataaccccgggggtcattcccaacgatcacatgcaatctaacgagtcttcggacctcgcgggggccgcttaagcggtggttagggtttgtctgacgcggggggagggggaaggaacgaaacactctcattcggaggcagctcggggtttggtcttggtggccacgggcacgcagaagagcgccgcgatcctcttaagcacccccccgccctccgtggaggcgggggtttggtcggcgggtggtacctggcgggccgctggctcgggcgggtcgcgcgccccagagtgtgaccttttcggtctgctcgcagacccccgggcagcgccgccgcggcggcgacgggctcgctgggtcctaggctccatggggaccgtatacgtggacaggctctggagcatccgcacgactgcggtgatattaccggagaccttctgcgggacgagccgggtcacgcggctgacgcggagcgtccgttgggcgacaaacaccaggacggggcacaggtacactatcttgtcacccggaggcgcgagggactgcaggagcttcagggagtggcgcagctgcttcatccccgtggcccgttgctcgcgtttgctggcggtgtccccggaagaaatatatttgcatgtctttagttctatgatgacacaaaccccgcccagcgtcttgtcattggcgaattcgaacacgcagatgcagtcggggcggcgcggtcccaggtccacttcgcatattaaggtgacgcgtgtggcctcgaacaccgagcgaccctgcagcgacccgcttaaaccggtccgccttttttgcacgggtaagcaccttgggtgggcggaggaggggggacgcgggggcggaggaggggggacgcgggggcggaggaggggggacgcgggggcggaggaggggggacgcgggggcggaggaggggggacgcggggggcggaggaggggggacgcagggggcggaggaggggggacgcgggggcggaggaggggggacgcgggggcggaggagggggctcacccgcgttcgtgccttcccgcaggaggaacgccctcgtcgaggcgaccggcggcgaccgttgcgtggaccgcttcctgctcgtcgggggggggggggggagccactgtggtcctccgggacgttttctggatggccgacatttccccaggcgcttttgtgccttgtgtaaaagcgcggcgtcccgctctccgatccccgcccctgggcacgcgcaagcgcaagcgccctgcccgccccctctcatcggagtctgaggtcgaatccgagacagccttggagtctgaggtcgaatccgagacagcatcggattcgaccgagtctggggaccaggaggaagccccccgcatcggtggccgtagggccccccggaggcttggggggcggttttttctggacatgtcggcggaatccaccacggggacggaaacggatgcgtcggtgtcggacgaccccgacgacacgtccgactggtcttgtgacgacattcccccacgacccaagcgggcccgggtaaacctgcggctcactagctctcccgatcggcgggatggggttatttttcctaagatggggcgggtccggtctacccgggaaacgcagccccgggcccccaccccgtcggccccaagcccaaatgcaatgctccggcgctcggtgcgccaggcccagaggcggagcagcgcacgatggacccccgacctgggctacatgcgccagtgtatcaatcagctgtttcgggtcctgcgggtcgcccgggacccccacggcagtgccaaccgcctgcgccacctgatacgcgactgttacctgatgggatactgccgagcccgtctggccccgcgcacgtggtgccgcttgctgcaggtgtccggcggaacctggggcatgcacctgcgcaacaccatacgggaggtggaggctcgattcgacgccaccgcagaacccgtgtgcaagcttccttgtttggaggccagacggtacggcccggagtgtgatcttagtaatctcgagattcatctcagcgcgacaagcgatgatgaaatctccgatgccaccgatctggaggccgccggttcggaccacacgctcgcgtcccagtccgacacggaggatgccccctcccccgttacgctggaaaccccagaaccccgcgggtccctcgctgtgcgtctggaggatgagtttggggagtttgactggaccccccaggagggctcccagccctggctgtctgcggtcgtggccgataccagctccgtggaacgcccgggcccatccgattctggggcgggtcgcgcagcagaagaccgcaagtgtctggacggctgccggaaaatgcgcttctccaccgcctgcccctatccgtgcagcgacacgtttctccggccgtgagtccggtcgccccgacccccttgtatgtccccaaaataaaagaccaaaatcaaagcgtttgtcccagcgtcttaatggcgggaagggcggagagaaacagaccacgcgtacatggggggtgtttgggggtttattgacatcggggctacagggtggtaaccggatagcagatgtgaggaagtctgggccgttcgccgcgaacggcgatcagagggtccgtttcttgcggaccacggcccggtgatgtgggttgctcgtctaaaatctcgggcatacccatacacgcacaacacggacgccgcaccgaatgggacgtcgtaagggggtgggaggtagctgggtggggtttgtgcagagcaatcagggaccgcagccagcgcatacaatcgcgctcccgtccgttggtcccgggcaggaccacgccgtactggtattcgtaccggctgagcagggtctccagggggtggttgggtgccgcggggaacggggtccacgccacggtccactcgggcaaaaaccgagtcggcacggcccacggttctcccacccacgcgtctggggtcttgatggcgataaatcttaccccgagccggattttttgggcgtattcgagaaacggcacacacagatccgccgcgcctaccacccacaagtggtagaggcgaggggggctgggttggtctcggtgcaacagtcggaagcacgccacggcgtccacgacctcggtgctctccaaggggctgtcctccgcaaacaggcccgtggtggtgtttggggggcagcgacaggacctagtgcgcacgatcgggcgggtgggtttgggtaagtccatcagcggctcggccaaccgtcgaaggttggccgggcgaacgacgaccggggtacccaggggttctgatgccaaaatgcggcactgcctaagcaggaagctccacagggccgggcttgcgtcgacggaagtccggggcagggcgttgttctggtcaaggagggtcattacgttgacgacaacaacgcccatgttggtatattacaggcccgtgtccggtttggggcacttgcagatttgtaaggccacgcacggcggggagacaggccgacgcgggggctgctctaaaaatttaagggccctacggtccacagacccgccttcccgggggggcccttggagcgaccggcagcggaggcgtccgggggaggggagggttatttacgggggggtaggtcagggggtgggtcgtcaaactgccgctccttaaaaccccggggcccgtcgttcggggtgctcgttggttggcactcacggtgcggcgaatggcctgtcgtaagttttgtcgcgtttacgggggacagggcaggaggaaggaggaggccgtcccgccggagacaaagccgtcccgggtgtttcctcatggccccttttataccccagccgaggacgcgtgcctggactccccgcccccggagacccccaaaccttcccacaccacaccacccggcgatgccgagcgcctgtgtcatctgcaggagatcctggcccagatgtacggaaaccaggactaccccatagaggacgaccccagcgcggatgccgcggacgatgtcgacgaggacgccccggacgacgtggcctatccggaggaatacgcagaggagctttttctgcccggggacgcgaccggtccccttatcggggccaacgaccacatccctcccccgcgtggcgcatctccccccggtatacgacgacgcagccgggatgagattggggccacgggatttaccgcagaagagctggacgccatggacaggcaggcggctcgagccatcagccgcggcggcaagcccccctcgaccatggccaagctggtgactggcatgggctttacgatccacggagcgctcaccccaggatcggaggggtgtgtctttgacagcagccacccagattacccccaacgggtaatcgtgaaggcggggtggtacacgagcacgagccacgaggcgcgactgctgaggcgactggaccacccggcgatcctgcccctcctggacctgcatgtcgtctccggggtcacgtgtctggtcctccccaagtaccaggccgacctgtatacctatctgagtaggcgcctgaacccactgggacgcccgcagatcgcagcggtctcccggcagctcctaagcgccgttgactacattcaccgccagggcattatccaccgcgacattaagaccgaaaatatttttattaacacccccgaggacatttgcctgggggactttggtgccgcgtgcttcgtgcagggttcccgatcaagccccttcccctacggaatcgccggaaccatcgacaccaacgcccccgaggtcctggccggggatccgtataccacgaccgtcgacatttggagcgccggtctggtgatcttcgagactgccgtccacaacgcgtccttgttctcggccccccgcggccccaaaaggggcccgtgcgacagtcagatcacccgcatcatccgacaggcccaggtccacgttgacgagttttccccgcatccagaatcgcgcctcacctcgcgctaccgctcccgcgcggccgggaacaatcgcccgccttacacccgaccggcctggacccgctactacaagatggacatagacgtcgaatatctggtttgcaaagccctcaccttcgacggcgcgcttcgccccagcgccgcagagctgctttgtttgccgctgtttcaacagaaatgaccgcccccggggggcggtgctgtttgcgggttggcacaaaaagaccccgacccgcgtctgtggtgtttttggcatcatgtcgccgggcgccatgcgtgccgttgttcccattatcccattccttttggttcttgtcggtgtatcgggggttcccaccaacgtctcctccaccacccaaccccaactccagaccaccggtcgtccctcgcatgaagcccccaacatgacccagaccggcaccaccgactctcccaccgccatcagccttaccacgcccgaccacacaccccccatgccaagtatcggactggaggaggaggaggaagaggaggagggggccggggatggcgaacatcttaaggggggagatgggacccgtgacaccctaccccagtccccgggtccagccgtcccgttggccggggatgacgagaaggacaaacccaaccgtcccgtagtcccaccccccggtcccaacaactcccccgcgcgccccgagaccagtcgaccgaagacaccccccaccagtatcgggccgctggcaactcgacccacgacccaactcccctcaaaggggcgacccttggttccgacgcctcaacataccccgctgttctcgttcctcactgcctcccccgccctggacaccctcttcgtcgtcagcaccgtcatccacaccttatcgtttgtgtgtattgttgctatggcgacacacctgtgtggtggttggtccagacgcgggcgacgcacacaccctagcgtgcgttacgtgtgcctgccgcccgaacgcgggtagggtatggggcggggatggggagagcccacacgcggaaagcaagaacaataaaggcggcgggatctagttgatatgcgtctctgggtgtttttggggtgtggtgggcgcggggcggtcattggacgggggtgcagttaaatacatgcccgggacccatgaagcatgcgcgacttccgggcctcggaacccacccgaaacggccaacggacgtctgagccaggcctggctatccggagaaacagcacacgacttggcgttctgtgtgtcgcgatgtctctgcgcgcagtctggcatctggggcttttgggaagcctcgtgggggctgttcttgccgccacccatctgggacctgcggccaacacaacggaccccttaacgcacgccccagtgtcccctcaccccagccccctggggggctttgccgtccccctcgtagtcggtgggctgtgtgccgtagtcctgggggcggcgtgtctgcttgagctcctgcgtcgtacgtgccgcgggtgggggcgttaccatccctacatggacccagttgtcgtataattttttcccccccccccttctccgcatgggtgatgtcgggtccaaactcccgacaccaccagctggcatggtataaatcaccggtgcgccccccaaaccatgtccggcagggggatggggggcgaatgcggagggcacccaacaacaccgggctaaccaggaaatccgtggccccggcccccaacaaagatcgcggtagcccggccgtgtgacattatcgtccataccgaccacaccgacgaatcccctaagggggaggggccattttacgaggaggaggggtataacaaagtctgtctttaaaaagcaggggttagggagttgttcggtcataagcttcagtgcgaacgaccaactaccccgatcatcagttatccttaaggtctcttttgtgtggtgcgttccggtatggggggggctgccgccaggttgggggccgtgattttgtttgtcgtcatagtgggcctccatggggtccgcggcaaatatgccttggcggatgcctctctcaagatggccgaccccaatcgctttcgcggcaaagaccttccggtcctggaccagctgaccgaccctccgggggtccggcgcgtgtaccacatccaggcgggcctaccggacccgttccagccccccagcctcccgatcacggtttactacgccgtgttggagcgcgcctgccgcagcgtgctcctaaacgcaccgtcggaggccccccagattgtccgcggggcctccgaagacgtccggaaacaaccctacaacctgaccatcgcttggtttcggatgggaggcaactgtgctatccccatcacggtcatggagtacaccgaatgctcctacaacaagtctctgggggcctgtcccatccgaacgcagccccgctggaactactatgacagcttcagcgccgtcagcgaggataacctggggttcctgatgcacgcccccgcgtttgagaccgccggcacgtacctgcggctcgtgaagataaacgactggacggagattacacagtttatcctggagcaccgagccaagggctcctgtaagtacgccctcccgctgcgcatccccccgtcagcctgcctctccccccaggcctaccagcagggggtgacggtggacagcatcgggatgctgccccgcttcatccccgagaaccagcgcaccgtcgccgtatacagcttgaagatcgccgggtggcacgggcccaaggccccatacacgagcaccctgctgcccccggagctgtccgagacccccaacgccacgcagccagaactcgccccggaagaccccgaggattcggccctcttggaggaccccgtggggacggtggcgccgcaaatcccaccaaactggcacatcccgtcgatccaggacgccgcgacgccttaccatcccccggccaccccgaacaacatgggcctgatcgccggcgcggtgggcggcagtctcctggcagccctggtcatttgcggaattgtgtactggatgcaccgccgcactcggaaagccccaaagcgcatacgcctcccccacatccgggaagacgaccagccgtcctcgcaccagcccttgttttactagatacccccccttaatgggtgcgggggggtcaggtctgcggggttgggatgggaccttaactccatataaagcgagtctggaaggggggaaaggcggacagtcgataagtcggtagcgggggacgcgcacctgttccgcctgtcgcacccacagctttttcgcgaaccgtcccgtttcgggatgccgtgccgcccgttgcagggcctggtgctcgtgggcctctgggtctgtgccaccagcctggttgtccgtggccccacggtcagtctggtatcaaactcatttgtggacgccggggccttggggcccgacggcgtagtggaggaagacctgcttattctcggggagcttcgctttgtgggggaccaggtcccccacaccacctactacgatggggtcgtagagctgtggcactaccccatgggacacaaatgcccacgggtcgtgcatgtcgtcacggtgaccgcgtgcccacgtcgccccgccgtggcatttgccctgtgtcgcgcgaccgacagcactcacagccccgcatatcccaccctggagctgaatctggcccaacagccgcttttgcgggtccggagggcgacgcgtgactatgccggggtgtacgtgttacgcgtatgggtcggggacgcaccaaacgccagcctgtttgtcctggggatggccatagccgccgaaggtactctggcgtacaacggctcggcccatggctcctgcgacccgaaactgcttccgtcttcggccccgcgtctggccccggcgagcgtataccaacccgcccctaacccggcctccaccccctcgaccaccacctccaccccctcgaccaccatccccgctccccaagcatcgaccacacccttccccacgggagacccaaaaccccaacctcacggggtcaaccacgaacccccatcgaatgccacgcgagcgacccgcgactcgcgatatgcgctaacggtgacccagataatccagatagccatccccgcgtccattatagccctggtgtttctggggagctgtatttgctttatacacagatgtcaacgccgctaccgacgctcccgccgcccgatttacagcccccagatacccacgggcatctcatgcgcggtgaacgaagcggccatggcccgcctcggagccgagctcaaatcgcatccgagcaccccccccaaatcccggcgccggtcgtcacgcacgccaatgccctccctgacggccatcgccgaagagtcggagcccgcgggggcggctgggcttccgacgccccccgtggaccccacgacatccaccccaacgcctcccctgttggtataggtccacggccactggccgggggcaccacataaccgaccgcagtcactgagttgggaataaaccggtattatttacctatatccgtgtatgtccatttctttcttcccccccccccccggaaaccaaagaaggaagcaaagaatggatgggaggagttcaggaagccggggagagggcccgcggcgcatttaaggcgttgttgtgttgactttggctcttctggcgggttggtgcggtgctgtttgttgggctcccattttacccgaagatcggctgctatccccgggacatggatcgcggggcggtggtggggtttcttctcggtgtttgtgttgtatcgtgcttggcgggaacgcccaaaacgtcctggagacgggtgagtgtcggcgaggacgtttcgttgcttccagctccggggcctacggggcgcggcccgacccagaaactactatgggccgtggaacccctggatgggtgcggccccttacacccgtcgtgggtctcgctgatgccccccaagcaggtgcccgagacggtcgtggatgcggcgtgcatgcgcgctccggtcccgctggcgatggcgtacgcccccccggccccatctgcgaccgggggtctacgaacggacttcgtgtggcaggagcgcgcggccgtggttaaccggagtctggttattcacggggtccgagagacggacagcggcctgtataccctgtccgtgggcgacataaaggacccggctcgccaagtggcctcggtggtcctggtggtgcaaccggccccagttccgaccccacccccgaccccagccgattacgacgaggatgacaatgacgagggcgaggacgaaagtctcgccggcactcccgccagcgggaccccccggctcccgcctccccccgcccccccgaggtcttggcccagcgcccccgaagtctcacatgtgcgtggggtgaccgtgcgtatggagactccggaagctatcctgttttcccccggggagacgttcagcacgaacgtctccatccatgccatcgcccacgacgaccagacctactccatggacgtcgtctggttgaggttcgacgtgccgacctcgtgtgccgagatgcgaatatacgaatcgtgtctgtatcacccgcagctcccagaatgtctgtccccggccgacgcgccgtgcgccgcgagtacgtggacgtctcgcctggccgtccgcagctacgcggggtgttccagaacaaaccccccaccgcgctgttcggccgaggctcacatggagcccgtcccggggctggcgtggcaggcggcctccgtcaatctggagttccgggacgcgtccccacaacactccggcctgtatctgtgtgtggtgtacgtcaacgaccatattcacgcctggggccacattaccatcagcaccgcggcgcagtaccggaacgcggtggtggaacagcccctcccacagcgcggcgcggatttggccgagcccacccacccgcacgtcggggcccctccccacgcgcccccaacccacggcgccctgcggttaggggcggtgatgggggccgccctgctgctgtctgcgctggggttgtcggtgtgggcgtgtatgacctgttggcgcaggcgtgcctggcgggcggttaaaagcagggcctcgggtaaggggcccacgtacattcgcgtggccgacagcgagctgtacgcggactggagctcggacagcgagggagaacgcgaccaggtcccgtggctggcccccccggagagacccgactctccctccaccaatggatccggctttgagatcttatcaccaacggctccgtctgtatacccccgtagcgacgggcatcaatctcgccgccagctcacaacctttggatccggaaggcccgatcgccgttactcccaggcctccgattcgtccgtcttctggtaaggcgccccatcccgaggccccacgtcggtcgccgaactgggcgaccgccggcgaggtggacgtcggagacgagctaatcgcgatttccgacgaacgcggacccccccgacatgaccgcccgcccctcgccacgtcgaccgcgccctcgccacacccgcgacccccgggctacacggccgttgtctccccgatggccctccaggctgtcgacgccccctccctgtttgtcgcctggctggccgctcggtggctccggggggcttccggcctgggggccgtcctgtgtgggattgcgtggtatgtgacgtcaattgcccgaggcgcacaaagggccggtggtccgcctagccgcagcaaattaaaaatcgtgagtcacagcgaccgcaacttcccacccggagctttcttccggcctcgatgacgtcccggctctccgatcccaactcctcagcgcgatccgacatgtccgtgccgctttatcccacggcctcgccagtttcggtcgaagcctactactcggaaagcgaagacgaggcggccaacgacttcctcgtacgcatgggccgccaacagtcggtattaaggcgttgacgcagacgcacccgctgcgtcggcatggtgatcgcctgtctcctcgtggccgttctgtcgggcggatttggggcgctcctgatgtggctgctccgctaaaagaccgcatcgacacgcgcgtccttcttgtcgtctctcttcccccccatcaccccgcaatttgcacccagcctttaactacattaaattgggttcgattggcaatgttgtctcccggttgatttttgggtgggtggggagtgggtgggtggggagtgggtgggtggggagtgggtgggtggggagtgggtgggtggggagtgggtgggtggggagtgggtgggtggggagtgggtgggtggggagtgggtgggtggggagtgggtgggtggggagtggcaaggaagaaacaagcccgaccaccagacagaaaatgtaaccatacccaaaccgactctgggggctgtttgtggggtcggaaccataggatgaacaaaccaccccgtacctcccgcacccaagggtgcgggtggctcatcggcatctgtccggtatgggttgttccccacccactcgcgttcggacgtcttagaatcatggcggttttctatgccgacatcggttttctcccccgcaataagacacgatgcgataaaatctgtttgtaaaatttattaagggtacaaattgccctagcacaggggtggggttagggccgggtccccacacccaaacgcaccaaacagatgcaggcagtgggtcgagtacagccccgcgtacgaacacgtcgatgcgtgtgtcagacagcaccagaaagcacaggccatcaacaggtcgtgcatgtgtcggtgggtttggacgcggggggccatggtggtgataaagttaatggccgccgtccgccagggccacaggggcgacgtctcttggttggcccggagccactgggtgtggaccagccgcgcgtggcggcccaacatggcccctgtagccgggggcgggggatcgcgcacgtttgcagcgcacatgcgagacacctcgaccacggttcgaaagaaggcccggtggtccgcgggcaacatcaccaggtgcgcaagcgcccgggcgtccagagggtagagccctgagtcatccgaggttggctcatcgcccgggtcttgccgcaagtgcgtgtgggttgggcttccggtgggcgggacgcgaaccgcggtgtggatcccgacgcgggcccgagcgtatgctccatcttgtggggagaaggggtctgggctcgccaggggggcatacttgcccgggctatacagacccgcgagccgtacgtggttcgcggggggtgcgtggggtccggggctccctgggagaccggggttgtcgtggatccctggggtcacgcggtaccctggggtctctgggagctcgcggtactctgggttccctaggttctcggggtggtcgcggaacccggggctcccggggaacacgcggtgtcctggggattgttggcggtcggacggcttcagatggcttcgagatcgtagtgtccgcaccgactcgtagtagacccgaatctccacattgccccgccgcttgatcattatcaccccgttgcgggggtccggagatcatgcgcgggtgtcctcgaggtgcgtgaacacctctggggtgcatgccggcggacggcacgccttttaagtaaacatctgggtcgcccggcccaactggggccgggggttgggtctggctcatctcgagagacacgggggggaaccaccctccgcccagagactcgggtgatggtcgtacccgggacctacttgtcgtcatcgtctttgtagtcgaccgagttcgccgggccggctccgcgggccagggcccgggcacgggcctcgggccccaggcacggcccgatgaccgcctcggcctccgccacccggcgccggaaccgagcccggtcggcccgctcgcgggcccacgagccgcggcgcgccaggcgggcggccgaggcccagaccaccaggtggcgcacccggacgtggggcgagaagcgcacccgcgtgggggtcgcgggggtcgcgggggtcgcggggggcttcggcgccccctccccgcccgcgcgtcgcaggcgcaggcgcgccaggtgctctgcggtgacgcgcaggcggagggcgaggcgcggcggaaggcggaaggggcgtgagggggggtgggaggggttagccccgccccccgggcccgcgccgggcggtggggaccgggggcggggggcggcggcggtgggccgggcctctggcgccggctcgggcggggggctgtccggccagtcgtcgtcgtcgtcgtcggacgcggactcgggaacgtggagccactggcgcagcagcagcgaacaagaaggcgggggcccactggcggggggcggcggcggggcggccgcgggcgcgctcctgaccacgggttccgagttgggcgtggaggttacctgggactgtgcggttgggaccgcgcccgtgggcccgggcggccgggggcggcgggggccgcgatggcggcggcgggccatgtttaaacagctctgcttatatagacctcccaccgtacacgcctaccgcccatttgcgtcaatggggcggagttgttacgacattttggaaagtcccgttgattttggtgccaaaacaaactcccattgacgtcaatggggtggagacttggaaatccccgtgagtcaaaccgctatccacgcccattgatgtactgccaaaaccgcatcaccatggtaatagcgatgactaatacgtagatgtactgccaagtaggaaagtcccataaggtcatgtactgggcataatgccaggcgggccatttaccgtcattgacgtcaatagggggcgtacttggcatatgatacacttgatgtactgccaagtgggcagtttaccgtaaatactccacccattgacgtcaatggaaagtccctattggcgttactatgggaacatacgtcattattgacgtcaatgggcgggggtcgttgggcggtcagccaggcgggccatttaccgtaagttatgtaacgacaacttcgtatagaaaggtatatacgaagttgtcaattctcatgtttgacagcttatcatcgaatttctgccattcatccgcttattatcacttattcaggcgtagcaaccaggcgtttaagggcaccaataactgccttaaaaaaattagaaaaactcatcgagcatcaaatgaaactgcaatttattcatatcaggattatcaataccatatttttgaaaaagccgtttctgcggcgcgcaattccacttgcaattacataaaaaattccggcggtttttcgcgtgtgactcaatgtcgaaatacctgcctaatgaacatgaacatcgcccaaatgtatttgaagacccgctgggagaagttcaagatatataagtaacaagcagccaatagtataaaaaaaaatctgagtttattacctttcctggaatttcagtgaaaaactgctaattatagagagatatcacagagttactcactaatgactaacgaaaaggtctggatagagaagttggataatccaactctttcagtgttaccacatgactttttacgcccacaacaagaaccttatacgaaacaagctacatattcgttacagctacctcagctcgatgtgcctcatgatagtttttctaacaaatacgctgtcgctttgagtgtatgggctgcattgatatatagagtaaccggtgacgatgatattgttctttatattgcgaataacaaaatcttaagattcaatattcaaccaacgtggtcatttaatgagctgtattctacaattaacaatgagttgaacaagctcaattctattgaggccaatttttcctttgacgagctagctgaaaaaattcaaagttgccaagatctggaaaggacccctcagttgttccgtttggcctttttggaaaaccaagatttcaaattagacgagttcaagcatcatttagtggactttgctttgaatttggataccagtaataatgcgcatgttttgaacttaatttataacagcttactgtattcgaatgaaagagtaaccattgttgcggaccaatttactcaatatttgactgctgcgctaagcgatccatccaattgcataactaaaatctctctgatcaccgcatcatccaaggatagtttacctgatccaactaagaacttgggctggtgcgatttcgtggggtgtattcacgacattttccaggacaatgctgaagccttcccagagagaacctgtgttgtggagactccaacactaaattccgacaagtcccgttctttcacttatcgcgacatcaaccgcacttctaacatagttgcccattatttgattaaaacaggtatcaaaagaggtgatgtagtgatgatctattcttctaggggtgtggatttgatggtatgtgtgatgggtgtcttgaaagccggcgcaaccttttcagttatcgaccctgcatatcccccagccagacaaaccatttacttaggtgttgctaaaccacgtgggttgattgttattagagctgctggacaattggatcaactagtagaagattacatcaatgatgaattggagattgtttcaagaatcaattccatcgctattcaagaaaatggtaccattgaaggtggcaaattggacaatggcgaggatgttttggctccatatgatcactacaaagacaccagaacaggtgttgtagttggaccagattccaacccaaccctatctttcacatctggttccgaaggtattcctaagggtgttcttggtagacatttttccttggcttattatttcaattggatgtccaaaaggttcaacttaacagaaaatgataaattcacaatgctgagcggtattgcacatgatccaattcaaagagatatgtttacaccattatttttaggtgcccaattgtatgtccctactcaagatgatattggtacaccgggccgtttagcggaatggatgagtaagtatggttgcacagttacccatttaacacctgccatgggtcaattacttactgcccaagctactacaccattccctaagttacatcatgcgttctttgtgggtgacattttaacaaaacgtgattgtctgaggttacaaaccttggcagaaaattgccgtattgttaatatgtacggtaccactgaaacacagcgtgcagtttcttatttcgaagttaaatcaaaaaatgacgatccaaactttttgaaaaaattgaaagatgtcatgcctgctggtaaaggtatgttgaacgttcagctactagttgttaacaggaacgatcgtactcaaatatgtggtattggcgaaataggtgagatttatgttcgtgcaggtggtttggccgaaggttatagaggattaccagaattgaataaagaaaaatttgtgaacaactggtttgttgaaaaagatcactggaattatttggataaggataatggtgaaccttggagacaattctggttaggtccaagagatagattgtacagaacgggtgatttaggtcgttatctaccaaacggtgactgtgaatgttgcggtagggctgatgatcaagttaaaattcgtgggttcagaatcgaattaggagaaatagatacgcacatttcccaacatccattggtaagagaaaacattactttagttcgcaaaaatgccgacaatgagccaacattgatcacatttatggtcccaagatttgacaagccagatgacttgtctaagttccaaagtgatgttccaaaggaggttgaaactgaccctatagttaagggcttaatcggttaccatcttttatccaaggacatcaggactttcttaaagaaaagattggctagctatgctatgccttccttgattgtggttatggataaactaccattgaatccaaatggtaaagttgataagcctaaacttcaattcccaactcccaagcaattaaatttggtagctgaaaatacagtttctgaaactgacgactctcagtttaccaatgttgagcgcgaggttagagacttatggttaagtatattacctaccaagccagcatctgtatcaccagatgattcgtttttcgatttaggtggtcattctatcttggctaccaaaatgatttttaccttaaagaaaaagctgcaagttgatttaccattgggcacaattttcaagtatccaacgataaaggcctttgccgcggaaattgacagaattaaatcatcgggtggatcatctcaaggtgaggtcgtcgaaaatgtcactgcaaattatgcggaagacgccaagaaattggttgagacgctaccaagttcgtacccctctcgagaatattttgttgaacctaatagtgccgaaggaaaaacaacaattaatgtgtttgttaccggtgtcacaggatttctgggctcctacatccttgcagatttgttaggacgttctccaaagaactacagtttcaaagtgtttgcccacgtcagggccaaggatgaagaagctgcatttgcaagattacaaaaggcaggtatcacctatggtacttggaacgaaaaatttgcctcaaatattaaagttgtattaggcgatttatctaaaagccaatttggtctttcagatgagaagtggatggatttggcaaacacagttgatataattatccataatggtgcgttagttcactgggtttatccatatgccaaattgagggatccaaatgttatttcaactatcaatgttatgagcttagccgccgtcggcaagccaaagttctttgactttgtttcctccacttctactcttgacactgaatactactttaatttgtcagataaacttgttagcgaagggaagccaggcattttagaatcagacgatttaatgaactctgcaagcgggctcactggtggatatggtcagtccaaatgggctgctgagtacatcattagacgtgcaggtgaaaggggcctacgtgggtgtattgtcagaccaggttacgtaacaggtgcctctgccaatggttcttcaaacacagatgatttcttattgagatttttgaaaggttcagtccaattaggtaagattccagatatcgaaaattccgtgaatatggttccagtagatcatgttgctcgtgttgttgttgctacgtctttgaatcctcccaaagaaaatgaattggccgttgctcaagtaacgggtcacccaagaatattattcaaagactacttgtatactttacacgattatggttacgatgtcgaaatcgaaagctattctaaatggaagaaatcattggaggcgtctgttattgacaggaatgaagaaaatgcgttgtatcctttgctacacatggtcttagacaacttacctgaaagtaccaaagctccggaactagacgataggaacgccgtggcatctttaaagaaagacaccgcatggacaggtgttgattggtctaatggaataggtgttactccagaagaggttggtatatatattgcatttttaaacaaggttggatttttacctccaccaactcataatgacaaacttccactgccaagtatagaactaactcaagcgcaaataagtctagttgcttcaggtgctggtgctcgtggaagctccgcagcagcttaaggttgagcattacgtatgatatgtccatgtacaataattaaatatgaattaggagaaagacttagcttcttttcgggtgatgtcacttaaaaactccgagaataatatataataagagaataaaatattagttattgaataagaactgtaaatcagctggcgttagtctgctaatggcagcttcatcttggtttattgtagcatgaatcatatttgcctttttttcctgtaattcaatgattcttgcttctatactatcctcaatgcaaaaccttgtgatcttcacaggtcgatactgaccaattctatgaactctatcaccactttgccattcaacactagggttccaccatgggtctaaaatgaatacttgcgaagctgcccgggcggccgcccaactacgcagccgatcaacaacagaaacgcgacggtcgagatgaggaacgcacactggagcctttatcagatggtgttgatttcaattactccggagcgtgatgcggatcaaagtaaccgcgatggaaggtgggggactcgaaatagatccgttcttagccctgcgaaacatctactgtacaccacatgcaacagccacaattctcatgtttgacagcttatcatcgaatttctgccattcatccgcttattatcacttattcaggcgtagcaaccaggcgtttaagggcaccaataactgccttaaaaaaattagaaaaactcatcgagcatcaaatgaaactgcaatttattcatatcaggattatcaataccatatttttgaaaaagccgtttctgtaatgaaggagaaaactcaccgaggcagttccataggatggcaagatcctggtatcggtctgcgattccgactcgtccaacatcaatacaacctattaatttcccctcgtcaaaaataaggttatcaagtgagaaatcaccatgagtgacgactgaatccggtgagaatggcaaaagtttatgcatttctttccagacttgttcaacaggccagccattacgctcgtcatcaaaatcactcgcatcaaccaaaccgttattcattcgtgattgcgcctgagccagacgaaatacgcgatcgctgttaaaaggacaattacaaacaggaatcgaatgcaaccggcgcaggaacactgccagcgcatcaacaatattttcacctgaatcaggatattcttctaatacctggaatgctgtttttccggggatcgcagtggtgagtaaccatgcatcatcaggagtacggataaaatgcttgatggtcggaagaggcataaattccgtcagccagtttagtctgaccatctcatctgtaacatcattggcaacgctacctttgccatgtttcagaaacaactctggcgcatcgggcttcccatacaatcgatagattgtcgcacctgattgcccgacattatcgcgagcccatttatacccatataaatcagcatccatgttggaatttaatcgcggcctcgagcaagacgtttcccgttgaatatggctcattttagcttccttagctcctgaaaatctcgataactcaaaaaatacgtccggtagtgatcttatttcattatggtgaaagttggaacctcttacgtgccgatcaacgtccctgggtccttttcatcacgtgctataaaaataattataatttaaattttttaatataaatatataaattaaaaatagaaagtaaaaaaagaaattaaagaaaaaatagtttttgttttccgaagatgtaaaagactctagggggatcgccaacaaatactaccttttatcttgctcttcctgctctcaggtattaatgccgaattgtttcatcttgtctgtgtagaagaccacacacgaaaatcctgtgattttacattttacttatcgttaatcgaatgtatatctatttaatctgcttttcttgtctaataaatatatatgtaaagtacgctttttgttgaaattttttaaacctttgtttatttttttttcttcattccgtaactcttctaccttctttatttactttctaaaatccaaatacaaaacataaaaataaataaacacagagtaaattcccaaattattccatcattaaaagatacgaggcgcgtgtaagttacaggcaagcgatcttttcgccaaaagttggcccagggcttcccggtatcaacagggacaccaggatttatttattctgcgaagtgatcttccgtcacaggtatttattcgcgataagctcatggagcggcgtaaccgtcgcacaggaaggacagagaaagcgcggatctgggaagtgacggacagaacggtcaggacctggattggggaggcggttgccgccgctgctgctgacggtgtgacgttctctgttccggtcacaccacatacgttccgccattcctatgcgatgcacatgctgtatgccggtataccgctgaaagttctgcaaagcctgatgggacataagtccatcagttcaacggaagtctacacgaaggtttttgcgctggatgtggctgcccggcaccgggtgcagtttgcgatgccggagtctgatgcggttgcgatgctgaaacaattatcctgagaataaatgccttggcctttatatggaaatgtggaactgagtggatatgctgtttttgtctgttaaacagagaagctggctgttatccactgagaagcgagcgaaacagtcgggaaaatctcccattatcgtagagatccgcattattaatctcaggagcctgtgtagcgtttataggaagtagtgttctgtcatgatgcctgcaagcggtaacgaaaacgatttgaatatgccttcaggaacaatagaaatcttcgtgcggtgttacgttgaagtggagcggattatgtcagcaatggacagaacaacctaatgaacacagaaccatgatgtggtctgtccttttacagccagtagtgctcgccgcagtcgagcgacagggcgaagccctcgagctggttgccctcgccgctgggctggcggctgtctatggccctgcaaacgcgccagaaacgccgtcgaagccgtgtgcgagacaccgcggccggccgccggcgttgtggatacctcgcggaaaacttggccctcactgacagatgaggggcggacgttgacacttgaggggccgactcacccggcgcggcgttgacagatgaggggcaggctcgatttcggccggcgacgtggagctggacagcctcgcaaatcggcgaaaacgcctgattttacgcgagtttcccacagatgatgtggacaagcctggggataagtgccctgcggtattgacacttgaggggcgcgactactgacagatgaggggcgcgatccttgacacttgaggggcagagtgctgacagatgaggggcgcacctattgacatttgaggggctgtccacaggcagaaaatccagcatttgcaagggtttccgcccgtttttcggccaccgctaacctgtcttttaacctgcttttaaaccaatatttataaaccttgtttttaaccagggctgcgccctgtgcgcgtgaccgcgcacgccgaaggggggtgcccccccttctcgaaccctcccggtcgagtgagcgaggaagcaccagggaacagcacttatatattctgcttacacacgatgcctgaaaaaacttcccttggggttatccacttatccacggggatatttttataattattttttttatagtttttagatcttcttttttagagcgccttgtaggcctttatccatgctggttctagagaaggtgttgtgacaaattgccctttcagtgtgacaaatcaccctcaaatgacagtcctgtctgtgacaaattgcccttaaccctgtgacaaattgccctcagaagaagctgttttttcacaaagttatccctgcttattgactcttttttatttagtgtgacaatctaaaaacttgtcacacttcacatggatctgtcatggcggaaacagcggttatcaatcacaagaaacgtaaaaatagcccgcgaatcgtccagtcaaacgacctcactgaggcggcatatagtctctcccgggatcaaaaacgtatgctgtatctgttcgttgaccagatcagaaaatctgatggcaccctacaggaacatgacggtatctgcgagatccatgttgctaaatatgctgaaatattcggattgacctctgcggaagccagtaaggatatacggcaggcattgaagagtttcgcggggaaggaagtggttttttatcgccctgaagaggatgccggcgatgaaaaaggctatgaatcttttccttggtttatcaaacgtgcgcacagtccatccagagggctttacagtgtacatatcaacccatatctcattcccttctttatcgggttacagaaccggtttacgcagtttcggcttagtgaaacaaaagaaatcaccaatccgtatgccatgcgtttatacgaatccctgtgtcagtatcgtaagccggatggctcaggcattgtctctctgaaaatcgactggatcatagagcgttaccagctgcctcaaagttaccagcgtatgcctgacttccgccgccgcttcctgcaggtctgtgttaatgagatcaacagcagaactccaatgcgcctctcatacattgagaaaaagaaaggccgccagacgactcatatcgtattttccttccgcgatatcacttccatgacgacaggatagtctgagggttatctgtcacagatttgagggtggttcgtcacatttgttctgacctactgagggtaatttgtcacagttttgctgtttccttcagcctgcatggattttctcatactttttgaactgtaatttttaaggaagccaaatttgagggcagtttgtcacagttgatttccttctctttcccttcgtcatgtgacctgatatcgggggttagttcgtcatcattgatgagggttgattatcacagtttattactctgaattggctatccgcgtgtgtacctctacctggagtttttcccacggtggatatttcttcttgcgctgagcgtaagagctatctgacagaacagttcttctttgcttcctcgccagttcgctcgctatgctcggttacacggctgcggcgagcgctagtgataataagtgactgaggtatgtgctcttcttatctccttttgtagtgttgctcttattttaaacaactttgcggttttttgatgactttgcgattttgttgttgctttgcagtaaattgcaagatttaataaaaaaacgcaaagcaatgattaaaggatgttcagaatgaaactcatggaaacacttaaccagtgcataaacgctggtcatgaaatgacgaaggctatcgccattgcacagtttaatgatgacagcccggaagcgaggaaaataacccggcgctggagaataggtgaagcagcggatttagttggggtttcttctcaggctatcagagatgccgagaaagcagggcgactaccgcacccggatatggaaattcgaggacgggttgagcaacgtgttggttatacaattgaacaaattaatcatatgcgtgatgtgtttggtacgcgattgcgacgtgctgaagacgtatttccaccggtgatcggggttgctgcccataaaggtggcgtttacaaaacctcagtttctgttcatcttgctcaggatctggctctgaaggggctacgtgttttgctcgtggaaggtaacgacccccagggaacagcctcaatgtatcacggatgggtaccagatcttcatattcatgcagaagacactctcctgcctttctatcttggggaaaaggacgatgtcacttatgcaataaagcccacttgctggccggggcttgacattattccttcctgtctggctctgcaccgtattgaaactgagttaatgggcaaatttgatgaaggtaaactgcccaccgatccacacctgatgctccgactggccattgaaactgttgctcatgactatgatgtcatagttattgacagcgcgcctaacctgggtatcggcacgattaatgtcgtatgtgctgctgatgtgctgattgttcccacgcctgctgagttgtttgactacacctccgcactgcagtttttcgatatgcttcgtgatctgctcaagaacgttgatcttaaagggttcgagcctgatgtacgtattttgcttaccaaatacagcaatagcaatggctctcagtccccgtggatggaggagcaaattcgggatgcctggggaagcatggttctaaaaaatgttgtacgtgaaacggatgaagttggtaaaggtcagatccggatgagaactgtttttgaacaggccattgatcaacgctcttcaactggtgcctggagaaatgctctttctatttgggaacctgtctgcaatgaaattttcgatcgtctgattaaaccacgctgggagattagataatgaagcgtgcgcctgttattccaaaacatacgctcaatactcaaccggttgaagatacttcgttatcgacaccagctgccccgatggtggattcgttaattgcgcgcgtaggagtaatggctcgcggtaatgccattactttgcctgtatgtggtcgggatgtgaagtttactcttgaagtgctccggggtgatagtgttgagaagacctctcgggtatggtcaggtaatgaacgtgaccaggagctgcttactgaggacgcactggatgatctcatcccttcttttctactgactggtcaacagacaccggcgttcggtcgaagagtatctggtgtcatagaaattgccgatgggagtcgccgtcgtaaagctgctgcacttaccgaaagtgattatcgtgttctggttggcgagctggatgatgagcagatggctgcattatccagattgggtaacgattatcgcccaacaagtgcttatgaacgtggtcagcgttatgcaagccgattgcagaatgaatttgctggaaatatttctgcgctggctgatgcggaaaatatttcacgtaagattattacccgctgtatcaacaccgccaaattgcctaaatcagttgttgctcttttttctcaccccggtgaactatctgcccggtcaggtgatgcacttcaaaaagcctttacagataaagaggaattacttaagcagcaggcatctaaccttcatgagcagaaaaaagctggggtgatatttgaagctgaagaagttatcactcttttaacttctgtgcttaaaacgtcatctgcatcaagaactagtttaagctcacgacatcagtttgctcctggagcgacagtattgtataagggcgataaaatggtgcttaacctggacaggtcccgtgttccaactgagtgtatagagaaaattgaggc

SEQ ID NO: 6 - DNA, 92555 bp, synthetic construct
  source 1..92555: mol_type = other DNA
cccgttgcgggcgctgcggaggagggcggggtcgctggcgcaggtgagcgggtaggcctcctgaaacaggccacacgggtcctccacgagttcgcggcaccccggggggcgcttaaactgtacgtcgctggcggcggtggccgtggacaccgccgaacccgtctccacgatcaggcgctccaggcagcgatgtttggcggcgatgtcggccgacgtaaagaacttaaagcaggggctgagcaccggcgaggccccgttgaggtggtaggccccgttatagagcaggtccccgtacgaaaatcgctgcgacgcccacgggttggccgtggccgcgaaggcccgggacgggtcgctctggccgtggtcgtacatgagggcggtgacatccccctccttgtcccccgcgtaaacgcccccggcggcgcgtccccgggggttgcagggccggcggaagtagttgacgtcggtcgacacgggggtggcgataaactcacacacggcgtcctggccgtggtccatccctgcgcgccgcggcacctgggcgcacccgaacacggggacgggctgggccggccccaggcggtttcccgccacgaccgcgttccgcaggtacacggctgccgcgttgtccagtagagggggagccccgcggcccaggtaaaagttttggggaaggttgcccatgtcggtgacggggttgcggacggttgccgtggccacgacggcggtgtagcccacgcccaggtccacgttcccgcgcggctgggtgagcgtgaagtttacccccccgccagtttcatgccgggccacctggagctggcccaggaagtacgcctccgacgcgcgctccgagaacagcacgttctcagtcacaaagcggtcctgtcggacgacggtgaacccaaacccgggatggaggcccgtcttgagctgatgatgcaaggccacgggactgatcttgaagtaccccgccatgagcgcgtaggtcagcgcgttctccccggccgcgctctcgcggacgtgctgcacgacgggctgtcggatcgacgaaaagtagttggcccccagagccggggggaccagggggacctgccgcgacaggtcgcgcagggccggggggaaattgggcgcgttcgccacgtggtcggccccggcgaacagcgcgtggacggggagggggtaaaaatagtcgccattttggatggtatggtccagatgctggggggccatcagcaggattccggcgtgcaacgccccgtcgaatatgcgcatgttggtggtggacgcggtgttggcgcccgcgtcgggcgccgccgagcagagcagcgccgttgtgcgttcggccatgttgtgggccagcacctgcagcgtgagcatggcgggcccgtccactaccacgcgcccgttgtgaaacatggcgttgaccgtgttggccaccagattggccgggtgcagggggtgcgcggggtccgtcacggggtcgctggggcaatcctcgccgggggtgatctccgggaccaccatgttctgcagggtggcgtatacgcggtcgaagcgaacccccgcggtgcagcagcggccccgcgagaaggcgggcaccatcacgtagtagtaaatcttgtggtgcacggtccagtccgccccccggtgcggccggtcgtccgcggcgtccgcggctcgggcctgggtgttgtgcagcagctggccgtcgttgcggttgaagtccgcggtcgccacgttacacgccgctgcgtacacggggtcgtggccccccgcgctaacccggcagtcgcgatggcggtccagggccgcgcgccgcatcagggcgtcgcagtcccacacgaggggtggcagcagcgccgggtctcgcattaggtgattcagttcggcttgcgcctgcccgcccagttccgggccggtcagggtaaagtcatcaaccagctgggccagggcctcgacgtgcgccaccaggtcccggtacacggccatgcactcctcgggaaggtctcccccgaggtaggtcacgacgtacgagaccagcgagtagtcgttcacgaacgccgcgcaccgcgtgttgttccagtagctggtgatgcactggaccacgagccgggccagggcgcagaagacgtgctcgctgccgtgtatggcggcctgcagcaggtaaaacaccgccgggtagttgcggtcttcgaacgccccgcgaacggcggcgatggtggcgggggccatggcgtggcgtcccacccccagctccaggccccgggcgtcccggaacgccgccggacatagcgccaggggcaagttgccgttcaccacgcgccaggtggcctggatctcccccgggccggccgggggaacgtccccccccggcagctccacgtcggccacccccacgaagaagtcgaacgcggggtgcagctcaagagccaggttggcgttgtcgggctgcataaactgctccggggtcatctggccttccgcgacccatcggacccgcccgtgggccaggcgctgcccccaggcgttcaaaaacagctgctgcatgtctgcggcggggccggccggggccgccacgtacgccccgtacggattggcggcttcgacggggtcgcggttaaggcccccgaccgccgcgtcaacgttcatcagcgaagggtggcacacggtcccgatcgcgtgttccagagacaggcgcagcacctggcggtccttcccccaaaaaaacagctggcggggcgggaaggcgcggggatccgggtggccgggggcggggactaggtccccggcgtgcgcggcaaaccgttccatgaccggattgaacaggcccaggggcaggacgaacgtcaggtccatggcgcccaccagggggtagggaacgttggtggcggcgtagatgcgcttctccagggcctccaaaaagatcagcttctcgccgatggacaccagatccgcgcgcacgcgcgtcgtctggggggcgctctcgagctcgtccagcgtctgccggttcaggtcgagctgctcctcctgcatctccagcaggtggcggcccacgtcgtccagacttcgcacggccttgcccatcacgagcgccgtgaccaggttggccccgttcaggaccatctcgccgtacgtcaccggcacgtcggcttcggtgtcctccactttcaggaaggactgcaggaggcgctgtttgatcggggcggtggtgacgagcaccccgtcgaccggacgcccgcgcgtgtcggcatgcgtcagacggggcacggccacggagggctgcgtggccgtggtgaggtccacgagccaggcctcgacggcctcccggcggtggcccgccttgcccaggaaaaagctcgtctcgcagaagcttcgctttagctcggcgaccagggtcgcccgggccaccctggtggccaggcggccgttgtccaggtatcgttgcatcggcaacaacaaagccaggggcggcgccttttccagcagcacgtgcagcatctggtcggccgtgccgcgctcaaacgccccgaggacggcctggacgttgcgagcgagctgttggatggcgcgcaactggcgatgcgcgctgatacccgtcccgtccagggcctcccccgtgagcagggcgatggcctcggtggccaggctgaaggcggcgttcagggcccggcggtcgataatcttggtcatgtaattgtgtgtgggttgctcgatggggtgcgggccgtcgcgggcaatcagcggctggtggacctcgaactgtacgcgcccctcgttcatgtaggccagctccggaaacttggtacacacgcacgccaccgacaacccgagctccagaaagcgcacgagcgacagggtgttgcaatacgaccccaacagggcgtcgaactcgacgtcatacaggctgtttgcatcggagcgcacgcgggaaaaaaaatcgaacaggcgtcgatgcgacgccacctcgatcgtgctaaggagggacccggtcggcaccatggccgcggcataccggtatcccggagggtcgcggttgggagcggccatggggtcgcgtggagatcggctgtctctagcgatattggcccggggaggctaagatccaccccaacgcccggccacccgtgtacgtgcccgacggcccaaggtccaccgaaagacacgacgggcccggacccaaaaaggcgggggatgctgtgtgagaggccgggtgtcggtcgggggggaaaggcaccgggagaaggctgcggcctcgttccaggagaacccagtgtccccaacagacccggggacgtgggatcccaggccttatataccccccccgccccacccccgttagaacgcgacgggtgcattcaagatggccctggtccaaaagcgtgccaggaagaaattggcagaggcggcaaagctgtccgccgccgccacccacatcgaggccccggccgcgcaggctatccccagggcccgtgtgcgcaggggatcggtgggcggcagcatttggttggtggcgataaagtggaaaagcccgtccggactgaaggtctcgtgggcggcggcgaacaaggcacacagggccgtgcctcccaaaaacacggacatcccccaaaacacgggcgccgacaacggcagacgatccctcttgatgttaacgtacaggaggagcgcccgcaccgcccacgtaacgtagtagccgacgatggcggccaggatacaggccggcgccaccacccttccggtcagcccgtaatacatgcccgctgccaccatctccaacggcttcaggaccaaaaacgaccaaaggaacagaatcacgcgctttgaaaagaccggctgggtatggggcggaagacgcgagtatgccgaactgacaaaaaagtcagaggtgccgtacgaggacaatgaaaactgttcctccagtggcagttctccctcctcccccccaaaggcggcctcgtcgaccagatctcgatccaccagaggaaggtcatcccgcatggtcatggggtgtgcggtggaggtggggagaccgaaaccgcaaagggtcgcttacgtcagcaggatcccgagatcaaagacacccgggttcttgcacaaacaccacccgggttgcatccgcggaggcgagtgttttgataaggccgttccgcgccttgatataacctttgatgttgaccacaaaacccggaatttacgcctacgccccaatgcccacgcaagatgaggtaggtaaccccccccccgtgggtgtgacgttgcgtttagttcattggaggccaaggggaaaatggggtggggaggaaacggaaaacccagtaggccgtgttgggaacacgcccggggttgtcctcaaaaggcagggtccatactacggaagccgtcgttgtattcgagacctgcctgtgcgacgcacgtcggggttgcctgtgtccggttcggccccaccgcgtgcggcacgcacgaggacgagtccgcgtgctttattggcgttccaagcgttgccctccagtttctgttgtcggtgttcccccatacccacgcccacatccaccgtagggggcctctgggccgtgtcacgtcgccgcccgcgatggagcttagctacgccaccaccatgcactaccgggacgttgtgttttacgtcacaacggaccgaaaccgggcctactttgtgtgcggggggtgtgtttattccgtggggcggccgtgtgcctcgcagcccggggagattgccaagtttggtctggtcgttcgagggacaggcccagacgaccgcgtggtcgccaactatgtacgaagcgagctccgacaacgcggcctgcaggacgtgcgtcccattggggaggacgaggtgtttctggacagcgtgtgtcttctaaacccgaacgtgagctccgagctggatgtgattaacacgaacgacgtggaagtgctggacgaatgtctggccgagtactgcacctcgctgcgaaccagcccgggtgtgctaatatccgggctgcgcgtgcgggcgcaggacagaatcatcgagttgtttgaacacccaacgatagtcaacgtttcctcgcactttgtgtataccccgtccccatacgtgttcgccctggcccaggcgcacctcccccggctcccgagctcgctggaggccctggtgagcggcctgtttgacggcatccccgccccacgccagccacttgacgcccacaacccgcgcacggatgtggttatcacgggccgccgcgccccacgacccatcgccgggtcgggggcggggtcggggggcgcgggcgccaagcgggccaccgtcagcgagttcgtgcaagtcaaacacattgaccgcgtgggccccgctggcgtttcgccggcgcctccgccaaacaacaccgactcaagttccctggtgcccggggcccaggattccgccccgcccggccccacgctaagggagctgtggtgggtgttttatgccgcagaccgggcgctggaggagccccgcgccgactctggcctcacccgcgaggaggtacgtgccgtacgtgggttccgggagcaggcgtggaaactgtttggctccgcgggggccccgcgggcgtttatcggggccgcgttgggcctgagccccctccaaaagctagccgtttactactatatcatccaccgagagaggcgcctgtcccccttccccgcgctagtccggctcgtaggccggtacacacagcgccacggcctgtacgtccctcggcccgacgacccagtcttggccgatgccatcaacgggctgtttcgcgacgcgctggcggccggaaccacagccgagcagctcctcatgttcgaccttctccccccaaaggacgtgccggtgggaagcgacgtgcaggccgacagcaccgctctgctgcgctttatagaatcgcaacgtctcgccgtccccgggggggtgatctcccccgagcacgtcgcgtaccttggtgcgttcctgagcgtgctgtacgctggccgcgggcgcatgtccgcagccacgcacaccgcgcggctgacaggggtgacctccctggtgctagcggtgggtgacgtggaccgtctttccgcgtttgaccgcggagcggcgggcgcggccagccgcacgcgggccgccgggtacctggatgtgcttcttaccgttcgtctcgctcgctcccaacacggacagtctgtgtaacagaccccaataaacgtatgtcgctaccacacccttgtgtgtcaatggacgcctctccgggggggaagggaaaacaaagaggggctgggggagcggcaccaccggggcctgaacaaacaaaccacagacacggttacagtttattcggtcgggcggagaaacggccgaagccacgccccctttattcgcgtctccaaaaaaacgggacacttgtccggagaacctttaggatgccagccagggcggcggtaatcataaccacgcccagcgcagaggcggccagaaacccgggcgcaattgcggccacgggctgcgtgtcaaaggctagcaaatgaatgacggttccgtttggaaatagcaacaaggccgtggacggcacgtcgctcgaaaacacgcttggggcgccctccgtcggcccggcggcgatttgctgctgtgtgttgtccgtatccaccagcaacacagacatgacctccccggccggggtgtagcgcataaacacggcccccacgagccccaggtcgcgctggttttgggtgcgcaccagccgcttggactcgatatcccgggtggagccttcgcatgtcgcggtgaggtaggttaggaacagtgggcgtcggacgtcgacgccggtgagcttgtagccgatcccccggggcagaggggagtgggtgacgacgtagctggcgttgtgggtgatgggtaccaggatccgtggctcgacgttggcagactgccccccgcaccgatgtgaggcctcagggacgaaggcgcggatcagggcgttgtagtgtgcccagcgcgtcagggtcgaggcgaggccgtgggtctgctgggccaggacttcgaccggggtctcggatcgggtggcttgagccagcgcgtccaggataaacacgctctcgtctagatcaaagcgcagggaggccgcgcatggcgaaaagtggtccggaagccaaaagagggttttctggtggtcggcccgggccagcgcggtccggaggtcggcgttggtcgctgcggcgacgtcggacgtacacagggccgaggctatcagaaggctccggcgggcgcgttcccgctgcaccgccgaggggacgcccgccaagaacggctgccggaggacagccgaggcgtaaaatagcgcccggtggacgaccggggtggtcagcacgcggccccctagaaactcggcatacagggcgtcgatgagatgggctgcgctgggcgccactgcgtcgtacgccgaggggctatccagcacgaaggccagctgatagcccagcgcgtgtaatgccaagctctgttcgcgctccagaatctcggccaccaggtgctggagccgagcctctagctgcaggcgggccgtgggatccaagactgacacattaaaaaacacagaatccgcggcacagcccgcggccccgcgggcggccaacccggcaagcgcgcgcgagtgggccaaaaagcctagcaggtcggagaggcagaccgcgccgtttgcgtgggcggcgttcacgaaagcaaaacccgacgtcgcgagcagccccgttaggcgccagaagagagggggacgcgggccctgctcggcgcccgcgtcccccgagaaaaactccgcgtatgcccgcgacaggaactgggcgtagttcgtgccctcctccgggtagccgcccacgcggcggagggcgtccagcgcggagccgttgtcggcccgcgtcagggaccctaggacaaagacccgataccgggggccgcccgggggcccgggaagagcccccggggggttttcgtccgcggggtccccgacccgatctagcgtctggcccgcggggaccaccatcacttccaccggagggctgtcgtgcatggatatcacgagccccatgaattcccgcccgtagcgcgcgcgcaccagcgcggcatcgcacccgagcaccagctcccccgtcgtccagatgcccacgggccacgtcgaggccgacggggagaaatacacgtacctacctggggatctcaacaggccccgggtggccaaccaggtcgtggacgcgttgtgcaggtgcgtgatgtccagctccgtcgtcgggtgccgccgggccccaaccggcggtcgggggggcggtgtatcacgcggcccgctcgggtggctcgccgtcgccacgttgtctccccgcgggaacgtcagggcctcggggtcagggacggccgaaaacgttacccaggcccgggaacgcagcaacacggaggcggttggattgtgcaagagacccttaaggggggcgaccgcggggggaggctgggcggtcggctcgaccgtgatgggggcgggcaggctcgcgttcgggggccggccgagcaggtaggtcttcgagatgtaaagcagctggccggggtcccgcggaaactcggccgtggtgaccaatacaaaacaaaagcgctcctcgtaccagcgaagaaggggcagagatgccgtagtcaggtttagttcgtccggcggcgccagaaatccgcgcggtggtttttgggggtcgggggtgtttggcagccacagacgcccggtgttcgtgtcgcgccagtacatgcggtccatgcccaggccatccaaaaaccatgggtctgtctgctcagtccagtcgtggacctgaccccacgcaacgcccaaaagaataacccccacgaaccataaaccattccccatgggggaccccgtccctaacccacggggcccgtggctatggcagggcttgccgccccgacgttggctgcgagccctgggccttcacccgaacttgggggttggggtggggaaaaggaagaaacgcgggcgtattggccccaatggggtctcggtggggtatcgacagagtgccagccctgggaccgaaccccgcgtttatgaacaaacgacccaacacccgtgcgttttattctgtctttttatttccgtcatagcgcgggttccttccggtattgtctccttccgtgtttcagttagcctcccccatctcccgggcaaacgtgcgcgccaggtcgcagatcgtcggtatggagcctggggtggtgacgtgggtctggaccatcccggaggtaagttgcagcagggcgtcccggcagccggcgggcgattggtcgtaatccaggataaagacgtgcatgggacggaggcgtttggccaagacgtccaaggcccaggcaaacacgttatacaggtcgccgttgggggccagcaactcgggggcccgaaacagggtaaataacgtgtccccgatatggggtcgtgggcccgcgttgctctggggctcggcaccctggggcggcacggccgtccccgaaagctgtccccaatcctcccgccacgacccgccgccctgcagataccgcaccgtattggcaagcagcccgtaaacgcggcgaatcgcggccaacatagccaggtcaagccgctcgccggggcgctggcgtttggccaggcggtcgatgtgtctgtcctccggaagggcccccaacacgatgtttgtgccgggcaaggtcggcgggatgagggccacgaacgccagcacggcctggggggtcatgctgcccataaggtatcgcgcggccgggtagcacaggagggcggcgatgggatggcggtcgaagatgagggtgagggccgggggcggggcatgtgagctcccagcctcccccccgatatgaggagccagaacggcgtcggtcacggcataaggcatgcccattgttatctgggcgcttgtcattaccaccgccgcgtccccggccgatatctcaccctggtcgaggcggtgttgtgtggtgtagatgttcgcgattgtctcggaagcccccagcacctgccagtaagtcatcggctcgggtacgtagacgatatcgtcgcgcgaacccagggccaccagcagttgcgtggtggtggttttccccatcccgtgaggaccgtctatataaacccgcagtagcgtgggcattttctgctccaggcggacttccgtggcttcttgctgccggcgagggcgcaacgccgtacgtcggttgctatggccgcgagaacgcgcagcctggtcgaacgcagacgcgtgttgatggcaggggtacgaagccatacgcgcttctacaaggcgcttgccaaagaggtgcgggagtttcacgccaccaagatctgcggcacgctgttgacgctgttaagcgggtcgctgcagggtcgctcggtgttcgaggccacacgcgtcaccttaatatgcgaagtggacctgggaccgcgccgccccgactgcatctgcgtgttcgaattcgccaatgacaagacgctgggcggggtttgtgtcatcatagaactaaagacatgcaaatatatttcttccggggacaccgccagcaaacgcgagcaacgggccacggggatgaagcagctgcgccactccctgaagctcctgcagtccctcgcgcctccgggtgacaagatagtgtacctgtgccccgtcctggtgtttgtcgcccaacggacgctccgcgtcagccgcgtgacccggctcgtcccgcagaaggtctccggtaatatcaccgcagtcgtgcggatgctccagagcctgtccacgtatacggtccccatggagcctaggacccagcgagcccgtcgccgccgcggcggcgctgcccgggggtctgcgagcagaccgaaaaggtcacactctggggcgcgcgacccgcccgagccagcggcccgccaggtaccacccgccgaccaaacccccgcctccacggagggcgggggggtgcttaagaggatcgcggcgctcttctgcgtgcccgtggccaccaagaccaaaccccgagctgcctccgaatgagagtgtttcgttccttccccctccccccgcgtcagacaaaccctaaccaccgcttaagcggcccccgcgaggtccgaagactcatttggatccggcgggagccacctgacaacagcccccgggtttccccacgccagacgccggtccgctgtgccatcgctccccttcatcccacccccatcttgtccccaaataaaacaaggtctggtagttaggacaacgaccgcagttctcgtgtgttattgtcgctctccgcctctcgcagatggacccgtattgcccatttgacgctctggacgtctgggaacacaggcgcttcatagtcgccgattcccgaaacttcatcacccccgagttcccccgggacttttggatgtcgcccgtctttaacctcccccgggagacggcggcggagcaggtggtcgtcctgcaggcccagcgcacagcggctgccgctgccctggagaacgccgccatgcaggcggccgagctccccgtcgatatcgagcgccggttacgcccgatcgaacggaacgtgcacgagatcgcaggcgccctggaggcgctggagacggcggcggccgccgccgaagaggcggatgccgcgcgcggggatgagccggcgggtgggggcgacgggggggcgcccccgggtctggccgtcgcggagatggaggtccagatcgtgcgcaacgacccgccgctacgatacgacaccaacctccccgtggatctgctacatatggtgtacgcgggccgcggggcgaccggctcgtcgggggtggtgttcgggacctggtaccgcactatccaggaccgcaccatcacggactttcccctgaccacccgcagtgccgactttcgggacggccggatgtccaagaccttcatgacggcgctggtcctgtccctgcagtcgtgcggccggctgtatgtgggccagcgccactattccgccttcgagtgcgccgtgttgtgtctctacctgctgtaccgaaacacgcacggggccgccgacgatagcgaccgcgctccggtcacgttcggggatctgctgggccggctgccccgctacctggcgtgcctggccgcggtgatcgggaccgagggcggccggccacagtaccgctaccgcgacgacaagctccccaagacgcagttcgcggccggcgggggccgctacgaacacggagcgctggcgtcgcacatcgtgatcgccacgctgatgcaccacggggtgctcccggcggccccgggggacgtcccccgggacgcgagcacccacgttaaccccgacggcgtggcgcaccacgacgacataaaccgcgccgccgccgcgttcctcagccggggccacaacctattcctgtgggaggaccagactctgctgcgggcaaccgcgaacaccataacggccctgggcgttatccagcggctcctcgcgaacggcaacgtgtacgcggaccgcctcaacaaccgcctgcagctgggcatgctgatccccggagccgtcccttcggaggccatcgcccgtggggcctccgggtccgactcgggggccatcaagagcggagacaacaatctggaggcgctatgtgccaattacgtgcttccgctgtaccgggccgacccggcggtcgagctgacccagctgtttcccggcctggccgccctgtgtcttgacgcccaggcggggcggccggtcgggtcgacgcggcgggtggtggatatgtcatcgggggcccgccaggcggcgctggtgcgcctcaccgccctggaactcatcaaccgcacccgcacaaaccccacccccgtgggggaggttatccacgcccacgacgccctggcgatccaatacgaacaggggcttggcctgctggcgcagcaggcacgcattggcttgggctccaacaccaagcgtttctccgcgttcaacgttagcagcgactacgacatgttgtactttttatgtctggggttcattccacagtacctgtcggcggtttagtgggtggtgggcgaggggggagggggcattagggagaaagaacaagagcctccgttgggttttctttgtgcctgtactcaaaaggtcataccccgtaaacggcgggctccagtcccggcccggcggttggcgtgaacgcaacggcgggagctgggttagcgtttagtttagcattcgctctcgcctttccgcccgcccccgaccgttgagcctttttttttttcgtccaccaaagtctctgtgggtgcgcgcatggcagccgatgccccgggagaccggatggaggagcccctgccagacagggccgtgcccatttacgtggctgggtttttggccctgtatgacagcggggactcgggcgagttggcattggatccggatacggtgcgggcggccctgcctccggataacccactcccgattaacgtggaccaccgcgctggctgcgaggtggggcgggtgctggccgtggtcgacgacccccgcgggccgttttttgtgggactgatcgcctgcgtgcaactggagcgcgtcctcgagacggccgccagcgctgcgattttcgagcgccgcgggccgccgctctcccgggaggagcgcctgttgtacctgatcaccaactacctgccctcggtctccctggccacaaaacgcctggggggcgaggcgcaccccgatcgcacgctgttcgcgcacgtagcgctgtgcgcgatcgggcggcgccttggcactatcgtcacctacgacaccggtctcgacgccgccatcgcgccctttcgccacctgtcgccggcgtctcgcgagggggcgcggcgactggccgccgaggccgagctcgcgctatccggacgcacctgggcgcccggcgtggaggcgctgacccacacgctgctttccaccgccgttaacaacatgatgctgcgggaccgctggagcctggtggccgagcggcggcggcaggccgggatcgccggacacacctacctccaggcgagcgaaaaattcaaaatgtggggggcggagcctgtttccgcgccggcgcgcgggtataagaacggggccccggagtccacggacataccgcccggctcgatcgctgccgcgccgcagggtgaccggtgcccaatcgtccgtcagcgcggggtcgcctcgcccccggtactgccccccatgaaccccgttccaacatcgggcaccccggcccccgcgccgcccggcgacgggagctacctgtggatcccggcctcccattacaaccagctcgtcgccggccacgccgcgccccaaccccagccgcattccgcgtttggtttcccggctgcggcgggggccgtggcctatgggcctcacggcgcgggtctttcccagcattaccctccccacgtcgcccatcagtatcccggggtgctgttctcgggacccagcccactcgaggcgcagatagccgcgttggtgggggccatagccgcggaccgccaggcgggcggtcagccggccgcgggagaccctggggtccgggggtcgggaaagcgtcgccggtacgaggcggggccgtcggagtcctactgcgaccaggacgaaccggacgcggactacccgtactaccccggggaggctcgaggcgggccgcgcggggtcgactctcggcgcgcggcccgccagtctcccgggaccaacgagaccatcacggcgctgatgggggcggtgacgtctctgcagcaggaactggcgcacatgcgggctcggaccagcgccccctatggaatgtacacgccggtggcgcactatcgccctcaggtgggggagccggaaccaacaacgacccacccggccctttgtcccccggaggccgtgtatcgccccccaccacacagcgccccctacggtcctccccagggtccggcgtcccatgcccccactcccccgtatgccccagctgcctgcccgccaggcccgccaccgcccccatgtccttccacccagacgcgcgcccctctaccgacggagcccgcgttcccccccgccgccaccggatcccaaccggaggcatccaacgcggaggccggggcccttgtcaacgccagcagcgcagcacacgtggacgttgacacggcccgcgccgccgatttgttcgtctctcagatgatgggggcccgctgattcgccccggtctttggtaccatgggatgtcttactgtatatctttttaaataaaccaggtaataccaaataagacccattggtgtatgttcttttttttttattgggaggggcgggtaggcgggtagctttacaatgcaaaagcctttgacgtggaggaaggcgtgggggggaggaaatcggcactgaccaagggggtccgttttgtcacgggaaaggaaagaggaaacaggccgcggacacccgggggagtttatgtgttcctttttctttcttcccacacacacacaaaaggcgtaccaaacaaaaaaaccaaaagatgcgcatgcggtttaacacccgtggtttttatttacaacaaaccccccgtcacaggtcgtcctcgtcggcgtcaccgtctttgttgggaacttgggtgtagttggtgttgcggcgcttgcgcatgaccatgtcggtgaccttggcgctgagcagcgcgctcgtgcccttcttcttggccttgtgttccgtgcgctccatggccgacaccagggccatgtaccgtatcatctccctggcctcggctagcttggcctcgtcaaagtcgccgccctcctcgccctccccggacgcgtccgggttggtggggttcttgagctccttggtggttagagggtacagggccttcatggggttgctctgcagccgcatgacgtaacgaaaggcgaagaaggccgccgccaggccggccaggaccaacagacccacggccagcgccccaaaggggttggacatgaaggaggacacgcccgacacggccgataccacgccgcccacgatgcccatcaccaccttgccgaccgcgcgccccaggtcgcccatcccctcgaagaacgcgcccaggcccgcgaacatggcggcgttggcgtcggcgtggatgaccgtgtcgatgtcggcgaagcgcaggtcgtgcagctggttgcggcgctggacctccgtgtagtccagcaggccgctgtccttgatctcgtggcgggtgtacacctccagggggacaaactcgtgatcctccagcatggtgatgttgaggtcgatgaaggtgctgacggtggtgatgtcggcgcggctcagctggtgggagtacgcgtactcctcgaagtacacgtagcccccaccgaaggtgaagtagcgccggtgtcccacggtgcacggctcgatcgcatcgcgcgtcagccgcagctcgttgttctcccccagctgcccctcgaccaacgggccctggtcttcgtaccgaaagctgaccagggggcggctgtagcaggccccgggccgcgagctgatgcgcatcgagttttggacgatcacgttgtccgcggcgaccggcacgcacgtggagacggccatcacgtcgccgagcatccgcgcgctcacccgccggcccacggtgaccgaggcgatggtgttggggttcagcttgcgggcctcgttccacagggtcagctcgtgattctgtagctcgcaccacgcgatggcaacgcggcccaacatatcgttgacatggcgctgtatgtggttgtacgtaaactgcagccgggcgaactcgatggaggaggtggtcttgatgcgctccacggacgcgttggcgctggccccgggcggcgggggcgtggggtttgggggcttgcggctctgctctcggaggtgttcccgcacgtacagctccgcgagcgtgttgctgagaaggggctggtacgcgatcagaaagcccccattggccaggtagtactgcggctggcccaccttgatgtgcgtcgcgttgtacctgcgggcgaagatgcggtccatggcgtcgcgggcgtccttgccgatgcagtcccccaggtccacgcgcgagagcgggtactcggtcaggttggtggtgaaggtggtggatatggcgtcggaggagaatcggaaggagccgccgtactcggagcgcagcatctcgtccacttcctgccacttggtcatggtgcagaccgacgggcgctttggcacccagtcccaggccacggtgaacttgggggtcgtgagcaggttccgggtggtcggcgccgtggcccgggccttggtggtgaggtcgcgcgcgtagaagccgtcgacctgcttgaagcggtcggcggcgtagctggtgtgttcggtgtgcgacccctcccggtagccgtaaaacggggacatgtacacaaagtcgccagtcgccagcacaaactcgttgtacgggtacaccgagcgcgcgtccacctcctcgacgatgcagtttaccgtcgtcccgtaccggtggaacgcctccacccgcgaggggttgtacttgaggtcggtggtgtgccagccccggctcgtgcgggtcgcggcgttggccggtttcagctccatgtcggtctcgtggtcgtcccggtgaaacgcggtggtctccaggttgttgcgcacgtacttggccgtggaccgacagacccccttggcgttgatcttgtcgatcacctcctcgaaggggacgggggcgcggtcctcaaagatccccataaactgggagtagcggtggccgaaccacacctgcgaaacggtgacgtctttgtagtacatggtggccttgaacttgtacggggcgatgttctccttgaagaccaccgcgatgccctccgtgtagttctgaccctcgggccgggtcgggcagcggcgcggctgctcgaactgcaccaccgtggcgcccgtggggggtgggcacacgtaaaagtttgcatcggtgttctccgccttgatgtcccgcaggtgctcgcgcagggtggcgtggcccgcggcgacggtcgcgttgtcgccggcggggcgtggtggcgttgggtttttcggttttttgttcttcttcggtttcgggtcccccgttggggcggcgccaagggcgggcggcgccggagtggcagggcccccgttcgccgcctgggtcgcggccgcgaccccaggcgtgccgggggaactcggagccgccgacgccaccaggacccccagcgtcaaccccaagagcgcccatacgacgaaccaccggcgcccccacgagggggcgccctggtgcatggcgggactacgggggcccgtcgtgccccccgtcaggtagcctgggggcgaggtgctggaggaccgagtagaggatcgagaaaacgtcgcggtcgtagaccacgaccgaccgggggccgatacagccgtcgggggcgctctcgacgatggccaccagcggacagtcggagtcgtacgtgagatatacgccgggcgggtaacggtaacgaccttcggaggtcgggcggctgcagtccgggcggcgcaactcgagctccccgcaccggtagaccgaggcaaagagtgtggtggcgataatcagctcgcgaatatatcgccaggcggcgcgctgagtgggcgttattccggaaatgccgtcaaaacagtaaaacctctgaaattcgctgacggcccaatcagcacccgagccccccgcccccatgatgaaccgggcgagctcctccttcaggtgcggcaggagccccacgttctcgacgctgtaatacagcgcggtgttggggggctgggcgaagctgtgggtggagtgatcaaagaggggcccgttgacgagctcgaagaagcgatgggtgatgctggggagcagggccgggtccacctggtgtcgcaggagagacgctcgcatgaaccggtgcgcgtcgaacacgcccggcgccgagcggttgtcgatgaccgtgcccgcgcccgccgtcagggcgcagaagcgcgcgcgcgccgcaaagccgttggcgaccgcggcgaacgtcgcgggcagcacctcgccgtggacgctgacccgcagcatcttctcgagctccccgcgctgctcgcggacgcagcgccccaggctggccaacgaccgcttcgtcaggcggtccgcgtacagccgccgtcgctcccgtacgtccgcggccgcttgcgtggcgatgtccccccacgtctcgggcccctgccccccgggcccgcggcgacggtcttcgtcctcgcccccgcccccgggagctcccaacccccgtgccccttcctctacggcgacacggtccccgtcgtcgtcggggcccgcgccgcccttgggcgcgtccgccgcgccccccgcccccatgcgcgccagcacgcgacgcagcgcctcctcgtcgcactgttcggggctgacgaggcgccgcaagagcggcgtcgtcaggtggtggtcgtagcacgcgcggatgagcgcctcgatctgatcgtcgggtgacgtggcctgaccgccgattattagggcgtccaccatatccagcgccgccaggtggctcccgaacgcgcgatcgaaatgctccgcccgccgcccgaacagcgccagttccacggccaccgcggcggtctcctgctgcaactcgcgccgcgccagcgcggtcaggttgctggcaaacgcgtccatggtggtctggccggcgcggtcgccggacgcgagccagaatcgcaattcgctgatggcgtacaggccgggcgtggtggcctgaaacacgtcgtgcgcctccagcagggcgtcggcctccttgcggaccgagtcgttctcgggcgacgggtggggctgcccgtcgccccccgcggtccgggccagcgcatggtccaacacggagagcgcccgcgcgcggtcggcgtccgacagcccggcggcgtggggcaggtaccgccgcagctcgttggcgtccagccgcacctgcgcctgctgggtgacgtggttacagatacggtccgccaggcggcgggcgatcgtcgccccctggttcgccgtcacacacagttcctcgaaacagaccgcgcaggggtgggacgggtcgctaagctccggggggacgataaggcccgaccccaccgcccccaccataaactcccgaacgcgctccagcgcggcggtggcgccgcgcgagggggtgatgaggtggcagtagtttagctgctttagaaagttctcgacgtcgtgcaggaaacacagctccatatggacggtcccgccatacgtatccagcctgacccgttggtgatacggacagggtcgggccaggcccatggtctcggtgaaaaacgccgcgacgtctcccgcggtcgcgaacgtctccaggctgcccaggagccgctcgccctcgcgccacgcgtactctagcagcaactccagggtgaccgacagcggggtgagaaaggccccggcctgggcctccaggcccggcctcagacgacgccgcagcgcccgcacctgaagcgcgttcagcttcagttgggggagcttcccccgtccgatgtgggggtcgcaccgccggagcagctctatctgaaacacataggtctgcacctgcccgagcagggctaacaacttttgacgggccacggtgggctcggacaccggggcggccatctcgcggcgccgatctgtaccgcggccggagtatgcggtggaccgaggcggtccgtacgctacccggtgtctggctgagccccggggtccccctcttcggggcggcctcccgcgggcccgccgaccggcaagccgggagtcggcggcgcgtgcgtttctgttctattcccagacaccgcggagaggaatcacggcccgcccagagatatagacacggaacacaaacaagcacggatgtcgtagcaataatttattttacacacattccccgccccgccctaggttcccccaccccccaacccctcacagcatatccaacgtcaggtctccctttttgtcggggggcccctccccaaacgggtcatccccgtggaacgcccgtttgcggccggcaaatgccggtcccggggcccccgggccgccgaacggcgtcgcgttgtcgtcctcgcagccaaaatccccaaagttaaacacctccccggcgttgccgagttggctgactagggcctcggcctcgtgcgccacctccagggccgcgtccgtcgaccactcgccgttgccgcgctccagggcacgcgcggtcagctccatcatctcctcgcttaggtactcgtcctccaggagcgccagccagtcctcgatctgcagctgctgggtgcggggccccaggcttttcacggtcgccacgaacacgctactggcgacggccgccccgccctcggagataatgccccggagctgctcgcacagcgagctttcgtgcgctccgccgccgaggttcgaggccgcgcacacaaacccggcccggggacaggccaggacgaacttgcgggtgcggtcaaaaataaggagcgggcacgcgtttttgccgcccatcaggctggcccagttcccggcctgaaacacacggtcgttgccggccatgccgtagtatttgctgatgctcaaccccaacacgaccatggggcgcgccgccatgacgggccgcagcaggttgcagctggcgaacatggacgtccacgcgcccggatgcgcgtccacggcgtccatcagcgcgcgggccccggcctccaggcccgccccgccctgcgcggaccacgcggccgccgcctgcacgctggggggacggcgggaccccgcgatgatggccgtgagggtgttgatgaagtatgtcgagtgatcgcagtaccgcagaatctggtttgccatgtagtacatcgccagctcgctcacgttgttgggggccaggttaataaagtttatcgcgccgtagtccagggaaaactttttaatgaacgcgatggtctcgatgtcctcgcgcgacaggagccgggcgggaagctggttgcgttggagggccgtccagaaccactgcgggttcggctggttggaccccgggggcttgccgttggggaagatggccgcgtggaactgcttcagcagaaagcccagcggtccgaggaggatgtccacgcgcttgtcgggcttctggtaggcgctctggaggctggcgacccgcgccttggcggcctcggacgcgttggcgctcgcgcccgcgaacaacacgcggctcttgacgcgcagctccttgggaaaccccagggtcacgcgggcaacgtcgccctcgaagctgctctcggcgggggccgtctggccggccgttaggctgggggcgcagatagccgccccctccgagagcgcgaccgtcagcgttttggccgacagaaacccgttgttaaacatgtccatcacgcgccgccgcagcaccggttggaattgattgcgaaagttgcgcccctcgaccgactgcccggcgaacaccccgtggcactggctcagggccaggtcctgatacacggcgaggttggatcgccgcccgagaagctgaagcagggggcatggcccgcacgcgtacgggtccagcgtcagggacatggcgtggttggcctcgcccagaccgtcgcgaaacttgaagttcctcccctccaccaggttgcgcatcagctgctccacctcgcggtccacgacctgcctgacgttgttcaccaccgtatgcagggcctcgcggttggtgatgatggtctccagccgccccatggccgtggggaccgcctggtccacgtactgcagggtctcgagttcggccatgacgcgctcggtcgccgcgcggtacgtctcctgcatgatggtccgggcggtctcggatccgtccgcgcgcttcagggccgagaaggcggcgtagtttcccagcacgtcgcagtcgctgtacatgctgttcatggtcccgaagacgccgatggctccgcgggcggcgctggcgaacttgggatggcgcgcccggaggcgcatgagcgtcgtgtgtacgcaggcgtggcgcgtgtcgaaggtgcacaggttgcagggcacgtcggtctggttggagtccgcgacgtatcgaaacacgtccatctcctggcgcccgacgatcacgccgccgtcgcagcgctccaggtaaaacagcatcttggccagcagcgccggggaaaacccacacagcatggccaggtgctcgccggcaaattcctgggttccgccgacgaggggcgcggtgggccgaccctcgaacccgggcaccacgtgtccctcgcggtccacctgtgggttggccgccacgtgggtcccgggcacgaggaagaagcggtaaaaggagggtttgctgtggtcctttgggtccgccggaccggcgtcgtccacctcggtgagatggagggccgagttggtgctaaataccatggcccccacgagtcccgcggcgcgcgccaggtacgccccgacggcgttggcgcgggccgcggccgtgtcctggccctcgcacagcggccacgcggagatgtcggtgggcggctcgtcgaagacggccatcgacacgatagactcgagggccagggcggcgtctccggccatgacggaggccaggcgctgttcgaacccgcccgccgggcccttgccgccgccgtcgcgcccaccccgcggggtcttaccctggctggcttcgaaggccgtgaacgtaatgtcggcggggagggcggcgccctcgtggttttcgtcaaacgccaggtgggcggccgcgcgggccacggcgtccacgtttcggcatcgcagtgccacggcggcgggtcccacgaccgcctcgaacaggaggcggttgagggggcggttaaaaaacggaagcgggtaggtaaaattctccccgatcgatcggtggttggcgttgaacggctcggcgatgacccggctaaaatccggcatgaacagctgcaacggatacacgggtatgcggtgcacctccgccccgcctatggttaccttgtccgagcctcccaggtgcagaaaggtgttgttgatgcacacggcctccttgaagccctcggtaacgaccagatacaggagggcgcggtccgggtccaggccgaggcgctcacacagcgcctcccccgtcgtctcgtgtttgaggtcgccgggccggggggtgtagtccgaaaagccaaaatggcggcgtgcccgctcgcagagtcgcgtcaggtttggggcctgggtgctggggtccaggtgccggccgccgtgaaagacgtacacggacgagctgtagtgcgatggcgtcagtttcagggacaccgcggtacccccgagccccgtcgtgcgagaacccacgaccacggctacgttggcctcaaagccgctctccacggtcaggcccacgaccaggggcgccacggcgacgtcggcatcgccgctgcgcgccgacagtaacgccagaagctcgatgccttcggacggacacgcgcgagcgtacacgtatcccaggggcccgggggggaccttgatggtggttgccgtcttgggctttgtctccatgtcctcctggcaatcggtccgcaaacggaggtaatcccggcacgacgacggacgcccgacgaggtatgtctcccgagcgtcaaaatccgggggggggggcggcgacggtcaaggggagggtgggagaccggggttggggaatgaatccctacccttcacagacaacccccgggtaaccacggggtgccgatgaaccccggcggctggcaacgcggggtccctgcgagaggcacagatgcttacggtcaggtgctccgggccgggtgcgtctgatatgcggttggtatatgtacactttacctgggggcgtgccggaccgccccagcccctcccacaccccgcgcgtcatcagccggatttaaatccggctacgtcacgctcctgtcggccgccggcggtccataagcccggccggccgggccgacgcgaataaaccgggccgccggccggggcgccgcgcagcagctcgccgcccggatccgccagacaaacaaggcccttgcacatgccggcccgggcgagcctgggggtccggtaattttgccatcccacccaagcggcttttggggtttttcctcttcccccctccccacatcccccctctttaggggttcgggtgggaacaaccgcgatgttttccggtggcggcggcccgctgtcccccggaggaaagtcggcggccagggcggcgtccgggttttttgcgcccgccggccctcgcggagccggccggggacccccgccttgtttgaggcaaaacttttacaacccctacctcgccccagtcgggacgcaacagaagccgaccgggccaacccagcgccatacgtactatagcgaatgcgatgaatttcgattcatcgccccgcgggtgctggacgaggatgcccccccggagaagcgcgccggggtgcacgacggtcacctcaagcgcgcccccaaggtgtactgcgggggggacgagcgcgacgtcctccgcgtcgggtcgggcggcttctggccgcggcgctcgcgcctgtggggcggcgtggaccacgccccggcggggttcaaccccaccgtcaccgtctttcacgtgtacgacatcctggagaacgtggagcacgcgtacggcatgcgcgcggcccagttccacgcgcggtttatggacgccatcacaccgacggggaccgtcatcacgctcctgggcctgactccggaaggccaccgggtggccgttcacgtttacggcacgcggcagtacttttacatgaacaaggaggaggttgacaggcacctacaatgccgcgccccacgagatctctgcgagcgcatggccgcggccctgcgcgagtccccgggcgcgtcgttccgcggcatctccgcggaccacttcgaggcggaggtggtggagcgcaccgacgtgtactactacgagacgcgccccgctctgttttaccgcgtctacgtccgaagcgggcgcgtgctgtcgtacctgtgcgacaacttctgcccggccatcaagaagtacgagggtggggtcgacgccaccacccggttcatcctggacaaccccgggttcgtcaccttcggctggtaccgtctcaaaccgggccggaacaacacgctagcccagccgcgggccccgatggccttcgggacatccagcgacgtcgagtttaactgtacggcggacaacctggccatcgaggggggcatgagcgacctaccggcatacaagctcatgtgcttcgatatcgaatgcaaggcggggggggaggacgagctggcctttccggtggccgggcacccggaggacctggttattcagatatcctgtctgctctacgacctgtccaccaccgccctggagcacgtcctcctgttttcgctcggttcctgcgacctccccgaatcccacctgaacgagctggcggccaggggcctgcccacgcccgtggttctggaattcgacagcgaattcgagatgctgttggccttcatgacccttgtgaaacagtacggccccgagttcgtgaccgggtacaacatcatcaacttcgactggcccttcttgctggccaagctgacggacatttacaaggtccccctggacgggtacggccgcatgaacggccggggcgtgtttcgcgtgtgggacataggccagagccacttccagaagcgcagcaagataaaggtgaacggcatggtgaacatcgacatgtacgggatcataaccgacaagatcaagctctcgagctacaagctcaacgccgtggccgaagccgtcctgaaggacaagaagaaggacctgagctatcgcgacatccccgcctactacgccaccgggcccgcgcaacgcggggtgatcggcgagtactgcatacaggattccctgctggtgggccagctgttttttaagtttttgccccatctggagctctcggccgtcgcgcgcttggcgggtattaacatcacccgcaccatctacgacggccagcagatccgcgtctttacgtgcctgctgcgcctggccgaccagaagggctttattctgccggacacccaggggcgatttaggggcgccgggggggaggcgcccaagcgtccggccgcagcccgggaggacgaggagcggccagaggaggagggggaggacgaggacgaacgcgaggagggcgggggcgagcgggagccggagggcgcgcgggagaccgccggccggcacgtggggtaccagggggccagggtccttgaccccacttccgggtttcacgtgaaccccgtggtggtgttcgactttgccagcctgtaccccagcatcatccaggcccacaacctgtgcttcagcacgctctccctgagggccgacgcagtggcgcacctggaggcgggcaaggactacctggagatcgaggtgggggggcgacggctgttcttcgtcaaggctcacgtgcgagagagcctcctcagcatcctcctgcgggactggctcgccatgcgaaagcagatccgctcgcggattccccagagcagccccgaggaggccgtgctcctggacaagcagcaggccgccatcaaggtcgtgtgtaactcggtgtacgggttcacgggagtgcagcacggactcctgccgtgcctgcacgttgccgcgacggtgacgaccatcggccgcgagatgctgctcgcgacccgcgagtacgtccacgcgcgctgggcggccttcgaacagctcctggccgatttcccggaggcggccgacatgcgcgcccccgggccctattccatgcgcatcatctacggggacacggactccatatttgtgctgtgccgcggcctcacggccgccgggctgacggccatgggcgacaagatggcgagccacatctcgcgcgcgctgtttctgccccccatcaaactcgagtgcgaaaagacgttcaccaagctgctgctgatcgccaagaaaaagtacatcggcgtcatctacgggggtaagatgctcatcaagggcgtggatctggtgcgcaaaaacaactgcgcgtttatcaaccgcacctccagggccctggtcgacctgctgttttacgacgataccgtatccggagcggccgccgcgttagccgagcgccccgcagaggagtggctggcgcgacccctgcccgagggactgcaggcgttcggggccgtcctcgtagacgcccatcggcgcatcaccgacccggagagggacatccaggactttgtcctcaccgccgaactgagcagacacccgcgcgcgtacaccaacaagcgcctggcccacctgacggtgtattacaagctcatggcccgccgcgcgcaggtcccgtccatcaaggaccggatcccgtacgtgatcgtggcccagacccgcgaggtagaggagacggtcgcgcggctggccgccctccgcgagctagacgccgccgccccaggggacgagcccgccccccccgcggccctgccctccccggccaagcgcccccgggagacgccgtcgcatgccgaccccccgggaggcgcgtccaagccccgcaagctgctggtgtccgagctggccgaggatcccgcatacgccattgcccacggcgtcgccctgaacacggactattacttctcccacctgttgggggcggcgtgcgtgacattcaaggccctgtttgggaataacgccaagatcaccgagagtctgttaaaaaggtttattcccgaagtgtggcaccccccggacgacgtggccgcgcggctccgggccgcagggttcggggcggtgggtgccggcgctacggcggaggaaactcgtcgaatgttgcatagagcctttgatactctagcatgagccccccgtcgaagctgatgtccctcattttacaataaatgtctgcggccgacacggtcggaatctccgcgtccgtgggtttctctgcgttgcgccggaccacgagcacaaacgtgctctgccacacgtgggcgacgaaccggtaccccgggcacgcggtgagcatccggtctatgagccggtagtgcaggtgggcggacgtgccgggaaagatgacgtacagcatgtggcccccgtaagtggggtccgggtaaaacaacagccgcgggtcgcacgccccgcctccgcgcaggatcgtgtggacgaaaaaaagctcgggttggccaagaatcccggccaagaggtcctggaggggggcgttgtggcggtcggccaacacgaccaaggaggccaggaaggcgcgatgctcgaatatcgtgttgatctgctgcacgaaggccaggattagggcctcgcggctggtggcggcgaaccgcccgtctcccgcgttgcacgcgggacagcaacccccgatgcctaggtagtagcccatcccggagagggtcaggcagttgtcggccacggtctggtccagacagaagggcagcgacacgggagtggtcttcaccaggggcaccgagaacgagcgcacgatggcgatctcctcggagggcgtctgggcgagggcggcgaaaaggccccgatagcgctggcgctcgtgtaaacacagctcctgtttgcgggcgtgaggcggcaggctcttccgggaggcccgacgcaccacgcccagagtcccgccggccgcagaggagcacgaccgccggcgctccttgccgtgatagggcccgggccgggagccgcggcgatgggggtcggtatcatacataggtacacagggtgtgctccagggacaggagcgagatcgagtggcgtctaagcagcgcgcccgcctcacggacaaatgtggcgagcgcggtgggctttggtacaaatacctgatacgtcttgaaggtgtagatgagggcacgcaacgctatgcagacacgcccctcgaactcgttcccgcaggccagcttggccttgtggagcagcagctcgtcgggatgggtggcggggggatggccgaacagaacccaggggtcaacctccatctccgtgatggcgcacatggggtcacagaacatgtgcttaaagatggcctcgggccccgcggcccgcagcaggctcacaaaccggcccccgtccccgggctgcgtctcggggtccgcctcgagctggtcgacgacgggtacgatacagtcgaagaggctcgtgttgttttccgagtagcggaccacggaggcccggagtctgcgcagggccagccagtaagcccgcaccagtaacaggttacacagcaggcattctccgccggtgcgcccgcgcccccggccgtgtttcagcacggtggccatcagagggcccaggtcgaggtcgggctgggcatcgggttcggtaaactgcgcaaagcgcggagccacgtcgcgcgtgcgtgccccgcgatgcgcttcccaggactggcggaccgtggcgcgacgggcctccgcggcagcgcgcagctggggccccgactcccagacggcgggggtgccggcgaggagcagcaggaccagatccgcgtacgcccacgtatccggcgactcctccggctcgcggtccccggcgaccgtctcgaattccccgttgcgagcggcggcgcgcgtacagcagctgtccccgcccccgcgccgaccctccgtgcagtccaggagacgggcgcaatccttccagttcatcagcgcggtggtgagcgacggctgcgtgccggatcccgccgccgaccccgccccctcctcgcccccggaggccaaggttccgatgagggcccgggtggcagactgcgccaggaacgagtagttggagtactgcaccttggcggctcccggggagggcgagggcttgggttgcttctgggcatgccgcccgggcaccccgccgtcggtacggaagcagcagtggagaaaaaagtgccggtggatgtcgtttatggtgagggcaaagcgtgcgaaggagccgaccagggtcgccttcttggtgcgcagaaagtggcggtccatgacgtacacaaactcgaacgcggccacgaagatgctagcggcgcagtggggcgcccccaggcatttggcacagagaaacgcgtaatcggccacccactggggcgagaggcggtaggtttgcttgtacagctcgatggtgcggcagaccagacagggccggtccagcgcgaaggtgtcgatggccgccgcggaaaagggcccggtgtccaaaagcccctccccacagggatccgggggcgggttgcggggtcctccgcgcccgcccgaaccccctccgtcgcccgcccccccgcgggcccttgagggggcggtgaccacgtcggcggcgacgtcctcgtcgagcgtaccgacgggcggcacacctatcacgtgactggccgccaggagctcggcgcagagagcctcgttaagagccaggaggctgggatcgaaggccacatacgcgcgctcgaacgcccccgccttccagctgctgccgggggactcttcgcacaccgcgacgctcgccaggaccccggggggcgaagttgccatggctgggcgggaggggcgcacgcgccagcgaactttacgggacacaatccccgactgcgcgctgcggtcccagaccctggagagtctagacgcgcgctacgtctcgcgagacggcgcgcatgacgcggccgtctggttcgaggatatgacccccgccgagctggaggttgtcttcccgactacggacgccaagctgaactacctgtcgcggacgcagcggctggcctccctcctgacgtacgccgggcctataaaagcgcccgacgacgccgccgccccgcagaccccggacaccgcgtgtgtgcacggcgagctgctcgcccgcaagcgggaaagattcgcggcggtcattaaccggttcctggacctgcaccagattctgcggggctgacgcgcgcgctgttgggcgggacggttcgcgaaccctttggtgggtttacgcgggcacgcacgctcccatcgcgggcgccatggcgggactgggcaagccctaccccggccacccaggtgacgccttcgagggtctcgttcagcgaattcggcttatcgtcccatctacgttgcggggcggggacggggaggcgggcccctactctccctccagcctcccctccaggtgcgcctttcagtttcatggccatgacgggtccgacgagtcgtttcccatcgagtatgtactgcggcttatgaacgactgggccgaggtcccgtgcaacccttacctgcgcatacagaacaccggcgtgtcggtgctgtttcaggggttttttcatcgcccacacaacgcccccgggggcgcgattacgccagagcggaccaatgtgatcctgggctccaccgagacgacggggctgtccctcggcgacctggacaccatcaaggggcggctcggcctggatgcccggccgatgatggccagcatgtggatcagctgctttgtgcgcatgccccgcgtgcagctcgcgtttcggttcatgggccccgaagatgccggacggacgagacggatcctgtgccgcgccgccgagcaggctattacccgtcgccgccgaacccggcggtcccgggaggcgtacggggccgaggccgggctgggggtggctggaacgggtttccgggccaggggggacggttttggcccgctccccttgttaacccaagggccctcccgcccgtggcaccaggccctgcggggtcttaagcacctacggattggcccccccgcgctcgttttggcggcgggactcgtcctgggggccgctatttggtgggtggttggtgctggcgcgcgcctataaaaaaggacgcaccgccgccctaatcgccagtgcgttccggacgccttcgccccacacagccctcccgtccgacacccccatatcgcttcccgacctccggtcccgatggccgtcccgcaatttcaccgccccagcaccgttaccaccgatagcgtccgggcgcttggcatgcgcgggctcgtcttggccaccaataactctcagtttatcatggataacaaccacccgcacccccagggcacccaaggggccgtgcgggagtttctccgcggtcaggcggcggcgctgacggaccttggtctggcccacgcaaacaacacgtttaccccgcagcctatgttcgcgggcgacgccccggccgcctggttgcggcccgcgtttggcctgcggcgcacctattcaccgtttgtcgttcgagaaccttcgacgcccgggaccccgtgaggcccggggagttccttctggggtgttttaatcaataaaagaccacaccaacgcacgagccttgcgtttaatgtcgtgtttattcaagggagtgggatagggttcgacggttcgaaacttaacacacaaaataatcgagcgcgtctagcccagtaacatgcgcacgtgatgtaggctggtcagcacggcgtcgctgtgatgaagcagcgcccggcgggtccgctgtaactgctgttgtaggcggtaacaggcgcggatcagcaccgccagggcgctacgaccggtgcgttgcacgtagcgtcgcgacagaactgcgtttgccgatacgggcggggggccgaattgtaagcgcgtcacctcttgggagtcatcggcggataacgcactgaatggttcgttggttatgggggagtgtggttcccgagggagtgggtcgagcgcctcggcctcggaatccgagaggaacaacgaggtggtgtcggagtcttcgtcgtcagagacatacagggtctgaagcagcgacacgggcgggggggtagcgtcaatgtgtagcgcgagggaggatgcccacgaagacaccccagacaaggagctgcccgtgcgtggatttgtggacgacgcggaagccgggacggatgggcggttttgcggtgcccggaaccgaaccgccggatactccccgggtgctacatgcccgttttggggctggggttggggctggggctggggctggggttggggctggggttggggttggggctggggttggggctggggctggggttggggctggggttggggctggggttggggctgggggttgggggttggggctgggggttggggttggggctgggggctggggctggggttggggctggggttgggggttgggggctggggttgggggttgggggctggggctggggctggggttggggctggggttggggctggggttggggctggggttgggggctgggggctggggttggggttagttggggttggggttggggctgggggttggggttggggggtggggttggggttggggctgggggttgggggctggggttggggctggggttggggctggggttggggctggggttggggctggggttggggctggggttggggctggggttggggctggggttggggctggggttggggctggggttggggctggggttggggctggggcgcggacaggcggttgacggtcaaatgcccccgggggcgcgcagatgtggtgggcgtggccaccggctgccgtgtagtggggcggcgggaaaccgggcctccgggcgtaacaccgccctccagcgtcaagtatgtggggggcgggcctgacgtcgggggcggggtgacgggttggaccgcgggaggcgggggagagggacctgcgggagaggatgaggtcggctcggccgggttgcggcctaaaacaggggccgtggggtcggcggggtcccagggtgaagggagggattcccgcgattcggacagcgacgcgacagcggggcgcgtaaggcgccgctgcggcccgcctacgggaaccctggggggggttggcgcgggacccgaggttagcggggggcggcggttttcgcccccgggcaaaaccgtgccggttgcgaccgggggcggaacgggatcgatagggagagcgggagaagcctggccggcgaactggggaccgagcgggaggggcacaccagacaccaaagcgtggagcgctggctctgggggtttgggaggggccggggggcgcgcgaaatcggtaaccggggcgaccgtgtcggggagggcaggcggccgccaaccctgggtggtcgcggaagcctgggtggcgcgcgccagggagcgtgcccggcggtgtcggcgcgcgcgcgacccggacgaagaagcggcagaagcgcgggaggaggcgggggggcggggggcggtggcatcggggggcgccggggaactttggggggacggcaagcgccggaagtcgtcgcgggggcccacgggcgccggccgcgtgctttcggccgggacgcccggtcgtgcttcgcgagccgtgactgccggcccagggggccgcggtgcacactgggacgtggggacggactgatcggcggtgggcgaaagggggtccggggcaaggaggggcgcggggccgccggagtcgtcagacgcgagctcctccaggccgtgaatccatgcccacatgcgaggggggacgggctcgccgggggtggcgtcggtgaatagcgtgggggccaggcttccgggccccaacgagccctccgtcccaacaaggtccgccgggccgggggtcgggttcgggaccgaggggctctggtcgtcgggggcgcgctggtacaccggatgccccgggaatagctcccccgacaggagggaggcgtcgaacggccgcccgaggatagctcgcgcgaggaaggggtcctcgtcggtggcgctggcggcgaggacgtcctcgccgcccgccacaaacgggagctcctcggtggcctcgctgccaacaaaccgcacgtcgggggggccgggggggtccgggttttcccacaacaccgcgaccggggtcatggagatgtccacgagcaccagacacggcgggccccgggcgaggggccgctcggcgatgagcgcggacaggcgcgggagctgtgccgccagacacgcgttttcaatcgggttcaggtcggcgtgcaggaggcggacggcccacgtctcgatgtcggacgacacggcatcgcgcaaggcggcgtccggcccgcgagcgcgtgagtcaaacagcgtgagacacagctccagctccgactcgcgggaaaaggccgtggtgttgcggagcgccacgacgacgggcgcgcccaggagcactgccgccagcaccaggtccatggccgtaacgcgcgccgcgggggtgcggtgggtggcggcggccggcacggcgacgtgctggcccgtgggccggtagagggcgttggggggagcggggggtgacgcctcgcgcccccccgaggggctcagcgtctgcccagattccagacgcgcggtcagaagggcgtcgaaactgtcatactctgtgtagtcgtccggaaacatgcaggtccaaagagcggccagagcggtgcttgggagacacatgcgcccgaggacgctcaccgccgccagcgcctgggcgggactcagctttcccagcgcggcgccgcgctcggttcccagctcggggaccgagcgccagggcgccagggggtcggtttcggacaacttgccgcggcgccagtctgccagccgcgtgccgaacatgaggccccgggtcggagggcctccggtcgaaaacactggcagcacgcggatgcgggcgtctggatgcggggtcaggcgctgcacgaatagcatggaatctgctgcgttctgaaacgcacgggggagggtgagatgcatgtactcgtgttggcggaccagatccaggcgccaaaaggtgtaaatgtgttccggggagctggccaccagcgccaccagcacgtcgttctcgttaaaggaaacgcggtgcctagtggagctgtggggcccgagcggcggtcccggggccgccgcgtcacccccccattccagctgggcccagcgacacccaaactcgcgcgtgagagtggtcgcgacgagggcgacgtagagctcggccgccgcatccatcgaggccccccatctcgcctggcggtggcgcacaaagcgtccgaagagctgaaagttggcggcctgggcgtcgctgagggccagctgaagccggttgatgacggtgatgacgtacatggccgtgacggtcgaggccgactccagggtgtccgtcggaagcggggggcgaatgcatgccgcctcgggacacatcagcagcgcgccgagcttgtcggtcacggccgggaagcagagcgcgtactgcagtggcgttccatccgggaccaaaaagctgggggcgaacggccgatccagcgtactggtggcctcgcgcagcaccaggggccccgggcctccgctcactcgcaggtacgcctcgccccggcggcgcagcatctgcgggtcggcctcttggccgggtggggcggacgcccgggcgcgggcgtctagggcgcgaagatccacgagcaggggcgcgggggcggcggccccccccgcgcccgtctggcctgtggccttggcgtacgcgctatataagcccatgcggcgttggatgagctcccgcgcgccccggaactcctccaccgcccatggggccaggtccccggccaccgcgtcgaattccgccaacaggccccccagggtgtcaaagttcatctcccaggccacccttggcaccacctcgtcccgcagccgggcgctcaggtcggcgtgttgggccacgcgccccccgagctcctccacggccccggcccgctcggcgctcttggcgcccaggacgccctggtacttggcgggaaggcgctcgtagtcccgctgggctcgcagccccgacacagtgttggtggtgtcctgcagggcgcgaagctgctcgcatgccgcgcgaaatccctcgggcgatttccaggcccccccgcgaacgcggccgaagcgaccccatacctcgtcccactccgcctcggcctcctcgagagacctccgcagggcctcgacgcggcgacgggtgtcgaagagcgcctgcaggcgcgcgccctgtcgcgtcaggaggcccgggccgtcgccgctggccgcgtttagcgggtgcgtctcaaaggtacgctgggcatgttccaaccaggcgaccgcctgcacgtcgagctcgcgcgccttctccgtctggtccaacagaatttcgacctgatccgcgatctcctccgccgagcgcgcctggtccagcgtcttggccacggtcgccgggacggcgaccaccttcagcagggtcttcagattggccagaccctcggcctcgagctgggcccggcgctcgcgcgcggccagcacctcccgcagccccgccgtgacccgctcggtggcttcggcgcgctgctgtttggcgcgcaccacggcgtccttggtatcggccaggtcctgtcgggtcacgaatgcgacgtagtcggcgtacgccgtgtccttcacggggctctggtccacgcgctccagcgccgccacgcacgccaccagcgcgtcctcgctcgggcagggcagggtgacccctgcccggacaagctcggcggccgccgccgggtcgttgcgcaccgcggatatctcctccgcggcggcggccaggtccagcgccacgcttccgatcgcgcgccgcgcgtcggcccggagggcgtccaggcgatcgcggatatccacgtactcggcgtagcccttttgaaaaaacggcacgtactggcgcagggccggcacgccccccaagtcttccgacaggtgtaggacggcctcgtggtagtcgataaacccgtcgttcgcctgggcccgctccagcagcccccccgccagccgcagaagccgcgccaggggctcggtgtccacccgaaacatgtcggcgtacgtgtcggccgcggccccgaaggccgcgctccagtcgatgcggtgaatggctgcgagcggggggagcatggggtggcgctggttctcgggggtgtatgggttaaacgcaagggccgtctccagggcaagggtcaccgccttggcgttggttcccagcgcctgttcggcccgctttcggaagtcccgggggttgtagccgtgcgtgcccgccagcgcctgcaggcgacggagctcgaccacgtcaaactcggcaccgctttccacgcggtccagcacggcctccacgtcggcggcccagcgctcgtggctactgcgggcgcgctgggccgccatcttctctctcaggtcggcgatggcggcctcaagttcgtcggcgcggcgtcgcgtggcgccgatgacctttcccagctcctgcagggcgcgcccgctgggggagtggtccccggccgtcccttcggcgtgcaacaggcccccgaacctgccctcgtggcccgcgaggctttcccgcgcgccggtggtcgcgcgcgtcgcggcctggatcagggaggcatgctctccctccggttggttggcggcccggcgcacctggacgacaaggtcggctgccgccgaccctaaggtcgtgagctgggcgatggccccccgcgcgtccagggccaaccgagtcgccttgacgtatcccgcggcgctgtcggccatggccgctaggaaggccaggggggaggccgggtcgctggcggccgcgcccagggccgtcaccgcgtcgaccaggacgcggtgcgcccgcacggccgcatccaccgtcgacgcggggtctgccgtcgcgacggcggcgctgccggcgttgatggcgttcgagacggcgtgggctatgatcggggcgtgatcggcgaagaactgcaagagaaacggagtctctggggcgtcggcgaacaggttcttcagcaccaccacgaagctgggatgcaagccagacagagccgtcgccgtgtccggagtcgggtgctccagggcatctcggtactgccccagcagcccccacatgtccgcccgcagcgccgccgtaacctcagggggcgccccccgaacggcctcggggaggtccgaccagcccgccggcagggaggcccgcagggtcgccaggacggccggacaggcctttagccccacaaagtcagggagggggcgcaggaccccctggagtttgtgcaagaacttctcccgggcgtcgcgggccaccttcgcccgctcccgcgctccctcgagcattgcctccagggagcgcgcgcgctcccgcaaacgggcacgcgcatcgggggcgagctctgccgtcagcttggcggcatccatggcccgcgcctgccgcagcgcttcctcggccatgcgcgtggcctctggcgacagcccgccgtcgtcggggtagggcgacgcgccgggcgcaggaacaaaggccgcgtcgctgtccagctgctggcccagggccgcatctagggcgtcgaagcgccgcagctcggccagacccgagctgcggcgcgcctgctggtcgttaatgtcgcggatgctgcgcgccagctcgtccagcggcttgcgttctatcagcccttggttggcggcgtccgtcaggacggagagccaggccgccaggtcctcgggggcgtccagcgtctggccccgctggatcagatcccgcaataggatggccgtggggctggtcgcgatcgggggcggggcgggaatggcggcgcgctgcgcgatgtcccgcgtgtgctggtcgaagacaggcagggactcgagcagctggaccacgggcacgacggcggccgaagccacgtgaaaccggcggtcgttgttgtcgctggcctgtagagccttggcgctgtatacggccccccggtaaaagtactccttaaccgcgccctcgatcgcccgacgggcctgggtccgcacctcctccagccgaacctgaacggcctcggggcccagggggggtgggcgcggagccccctgcggggccgccccggccggggcgggcattacgccgaggggcccggcgtgctgtgagaccgcgtcgaccccgcgagcgagggcgtcgagggcctcgcgcatctggcgatcctccgcctccaccctaatctcttcgccacgggcaaatttggccagagcctggactctatacagaagcggttctgggtgcgtcggggtggcgggggcaaaaagggtgtccgggtgggcctgcgagcgctccagaagccactcgccgaggcgtgtatacagattggccggcggggccgcgcgaagctgcagctccaggtccgcgagttccccgtaaaaggcgtccgtctcccgaatgacatccctagccacaaggatcagcttcgccagcgccaggcgaccgatcagagagttttcgtccagcacgtgctggacgaggggcagatgggcggccacgtcggccaggctcaggcgcgtggaggccagaaagtcccccacggccgttttccggggcagcatgctcagggtaaactccagcagggcggcggccgggccggccaccccggcctgggtgtgcgtccgggccccgttctcgatgagaaaggcgaggacgcgttcaaagaaaaaaataacacagagctccagcagccccggagaagccggatacggcgaccgtaaggcgctgatggtgagccgcgaacacgcggcgacctcgcgggccagggtggcggagcacgcggtgaacttaaccgccgtggcggccacgtttgggtgggcctcgaacagctgggcgaggtctgcgcccgggggctcgggtgagcggcgagtcttcagcgcctcgagggcctgtgaggacgccggaaccatgggcccgtcgtcctcgcccgcctcggcgaccggcggcccggccgggtcggggggtgccgaggcgaggacaggctccggaacggaggcggggaccgcggccccgacgggggttttgcctttgggggtggatttcttcttggttttggcagggggggccgagcgtttcgttttctcccccgaagtcaggtcttcgacgctggaaggcggagtccaggtgggtcggcggcgcttgggaaggccggccgagtagcgtgcccggtgccgaccaaccgggacgacgcccatctccaggacccgcatgtcgtcgtcatcttcttcggccgcctctgcggcgggggtcttgggggcggagggaggcggtggtgggatcgcggagggtgggtcggcggaggggggatccgtgggtggggtaccctttagggccaccgcccatacatcgtcgggcgcccgattcgggcgcttggcctctggttttgccgacggaccggccgtcccccgggatgtctcggaggccctgtcgtcgcgacgggcccgggtcggtggcggcgactgggcggctgtgggcgggtgtggccccggcccccctcccccctcccgggggcccacgccgacgcagggctcccccaggcccgcgatctcgccccgcagggggtgcgtgatggccacgcgccgttcgctgaacgcttcgtcctgcatgtaagtctcgctggccccgtaaagatgcagagccgcggccgtcaagtccgcaggagccgcgggttccgggcccgacggcacgaaaaacaccatggctcccgcccaccgtacgtccgggcgatcgcgggtgtaatacgtcaggtatggatacatgtcccccgcccgcactttggcgatgaacgcgggggtgccctccggaaggccatgcgggtcaaaaaggtatgcggtgtcgccgtccctgaacagccccatccctagggggccaatggttaggagcgtgtacgacagggggcgcagggcccacgggccggcgaagaacgtgtgtgcggggcattgtgtctccagcaggcctgccgcgggctccccgaagaagcccacctcgccgtatacgcgcgagaagacacagcgcagtccgccgcgcgcccctgggtactcgaggaagttggggagctcgacgatcgaacacatgcgcggcggcccagggcccgcagtcgcgcgcgtccactcgcccccctcgaccaaacatccctcgatggcctccgcggacagaacgtcgcgagggcccacatcaaatatgaggctgagaaaggacagcgacgagcgcatgcacgataccgacccccccggctccaggtcgggcgcgaactggttccgagcaccggtgaccacgatgtcgcgatcccccccgcgttccatcgtggagtgcggtggggtgcccgcgatcatatgtgccctgcgggccagagacccggcctgtttatggaccggacccccggggttagtgttgtttccgccacccacgcccccgtaccatggccccggttcccctgattaggctacgagtcgcggtgatcgcttcccaaaaaccgagctgcgtttgtctgtcttggtcttccccccccccagcccgcacaccataacaccgagaacaacacacgggggtgggcggaacataataaagctttattggtaactagttaacggcaagtccgtgggtggcgcgacggtgtcctccgggatcatctcgtcgtcctcgacgggggtgttggaatgaggcgcctcctcgcggtccacctggcgtgggccgtgcccataggcctccggcttctgtgcgtccatgggcgtaggcgcggggagactgtttccggcgtcgcggacctccaggtccctgggagcctccggtccggctaacggacgaaacgcggaagcgcgaaacacgccgtcggtgacccgcaggagctcgttcatcagtaaccaatccatactcagcgtaacggccagcccctggcgagacagatccacggagtccggaaccgcggtcgtctggcccagggggccgaggctgtagtccccccaggcccctaggtcgcgacggctcgtaagcacgacgcggtcggccgcggggctttgcgggggggcgtcctcgggcgcatgcgccattacctctcggatggccgcggcgcgctggtcggccgagctgaccaagggcgccacgaccacggcgcgctccgtctgcaggcccttccacgtgtcgtggagttcctggacaaactcggccacgggctcgggtcccgcggccgcgcgcgcggcttgatagcaggccgacagacgccgccagcgcgctagaaactgacccatgaaacaaaacccggggacctggtctcccgacagcagcttcgacgcccgggcgtgaatgccggacacgacggacagaaacccgtgaatttcgcgccggaccacggccagcacgttgtcctcgtgcgacacctgggccgccagctcgtcgcacacccccaggtgcgccgtggtttcggtgatgacggaacgcaggctcgcgagggacgcgaccagcgcgcgcttggcgtcgtgatacatgctgcagtactgactcaccgcgtcccccatggcctcggggggccagggccccaggcggtcgggcgtgtccccgaccaccgcatacaggcggcgcccgtcgctctcgaaccgacactcgaaaaaggcggagagcgtgcgcatgtgcagccgcagcagcacgatggcgtcctccagttggcgaatcagggggtcggcgcgctcggcgaggtcctgcagcaccccccgggcagccagggcgtacatgctaatcaacaggaggctggtgcccacctcggggggcggggggggctgcagttggaccaggggccgcagctgctcgacggcacccctggagatcacgtacagctcccggagcagctgctctatgttgtcggccatctgcatagtggggccgaggccgccccgggcggccggttcgaggagagtgatcagcgcgcccagtttggtgcgatggccctcgaccgtggggagatagcccagcccaaagtcccgggcccaggccaacacacgcagggcgaactcgaccgggcggggaaggtaggccgcgctacacgtggccctcagcgcgtccccaaccaccagggccagaacgtaggggacgaagcccgggtcggcgaggacgttggggtgaatgccctcgagggcggggaagcggatctgggtcgccgcggccaggtggacagagggggcatggctgggctgcccgacggggagaagcgcggacagcggcgtggccggggtggtgggggtgatgtcccagtgggtctgaccatacacgtcgatccagatgagcgccgtctcgcggagaaggctgggttgaccggaactaaagcggcgctcggccgtctcaaactcccccacgagcgcccgccgcaggctcgccagatgttccgtcggcacggccggccccatgatacgcgccagcgtctggctcagaacgccccccgacaggccgaccgcctcacagagccgcccgtgcgtgtgctcgctggcgccctggacccgcctgaaagtttttacgtagttggcatagtacccgtattcccgcgccagaccaaacacgttcgaccccgcgagggcaatgcacccaaagagctgctggacttcgccgagtccgtggccggcgggcgtccgcgcggggacgcccgccgccagaaacccctccagggccgaaaggtagtgcgtgcagtgcgagggcgtgaacccagcgtcgatcagggtgttgatcaccacggagggcgaattggtattctggatcaacgtccacgtctgctgcagcagagccagcagccgctgctgggcgccggcggagggctgctccccgagctgcagcaggctggagacggcaggctggaagactgccagtgccgacgaactcaggaacggcacgtcgggatcaaacacggccacgtccgtccgcacgcgcgccattagcgtccccgggggcgcacaggccgagcgcgggctgacgcggctgagggccgtcgacacgcgcacctcctcgcggctgcgaaccatcttgttggcctccagtggcggaatcattatggccgggtcgatctcccgcacggtgtgctgaaactgcgccaacaggggcggcgggaccacagccccccgctcgggggtcgtcaggtactcgtccaccagggccaacgtaaagagggcccgtgtgaggggagtgagggtcgcgtcgtctatgcgctggaggtgcgccgagaacagcgtcacccgattactcaccagggccaagaaccggaggccctcttgcacgaacggggcggggaagagcaggctgtacgccggggtggtaaggttcgcgctgggctgccccaacgggaccggcgccagcttgagcgacgtctccccaagggcctcgatggaggtccgcgggctcatggccaagcagctcttggtgacggtttgccagcggtctatccactccacggcgcactggcggacgcggaccggccccagggccgccgcggtgcgcaggccggcggactccagcgcatgggacgtgtcggagccggtgaccgcgaggatggtgtccttgatgacctccatctcccggaaggcctggtcgggggcctcggggagagccaccaccaagcggtgtacgagcaacccggggaggttctcggccaagagcgccgtctccggaagcccgtgggcccggtggagcgcgcacaggtgttccagcagcggccgccagcatgcccgcgcgtctgccggggcgatggccgttcccgacaacagaaacgccgccatggcggcgcgcagcttggccgtggccagaaacgccgggtcgtccgccccgtttgccgtctcggccgtgggggttggcggttggcgaaggccggctaggctcgccaataggcgctgcataggtccgtccgagggcggaccggcgggtgaggtcgtgacgacgggggcctcggacgggagaccgcggtctgccatgacgcccggctcgcgtgggtgggggacagcgtagaccaacgacgagaccgggcgggaatgactgtcgtgcgctgtagggagcggcgaattatcgatcccccgcggccctccaggaaccccgcaggcgttgcgagtaccccgcgtcttcgcggggtgttatacggccacttaagtcccggcatcccgttcgcggacccaggcccgggggattgtccggatgtgcgggcagcccggacggcgtgggttgcggactttcggcggggcggcccaaatggccctttaaacgtgtgtatacggacgcgccgggccagtcggccaacacaacccaccggaggcggtagccgcgtttggctgtggggtgggtggttccgccttgcgtgagtgtcctttcgaccccccccctcccccgggtcttgctaggtcgcgatctgtggtcgcaatgaagaccaatccgctacccgcaaccccttccgtgtggggcgggagtaccgtggaactcccccccaccacacgcgataccgcggggcagggcctgcttcggcgcgtcctgcgccccccgatctctcgccgcgacggcccagtgctccccagggggtcgggaccccggagggcggccagcacgctgtggttgcttggcctggacggcacagacgcgccccctggggcgctgacccccaacgacgataccgaacaggccctggacaagatcctgcggggcaccatgcgcgggggggcggccctgatcggctccccgcgccatcatctaacccgccaagtgatcctgacggatctgtgccaacccaacgcggatcgtgccgggacgctgcttctggcgctgcggcaccccgccgacctgcctcacctggcccaccagcgcgccccgccaggccggcagaccgagcggctgggcgaggcctggggccagctgatggaggcgaccgccctggggtcggggcgagccgagagcgggtgcacgcgcgcgggcctcgtgtcgtttaacttcctggtggcggcgtgtgccgcctcgtacgacgcgcgcgacgccgccgatgcggtacgggcccacgtcacggccaactaccgcgggacgcgggtgggggcgcgcctggatcgtttttccgagtgtctgcgcgccatggttcacacgcacgtcttcccccacgaggtcatgcggtttttcggggggctggtgtcgtgggtcacccaggacgagctagcgagcgtcaccgccgtgtgcgccgggccccaggaggcggcgcacaccggccacccgggccggccccgctcggccgtgatcctcccggcgtgtgcgttcgtggacctggacgccgagctggggctggggggcccgggcgcggcgtttctgtacctggtattcacttaccgccagcgccgggaccaggagctgtgttgtgtgtacgtgatcaagagccagctccccccgcgcgggttggagccggccctggagcggctgtttgggcgcctccggatcaccaacacgattcacggcaccgaggacatgacgcccccggccccaaaccgaaaccccgacttccccctcgcgggcctggccgccaatccccaaaccccgcgttgctctgctggccaggtcacgaacccccagttcgccgacaggctgtaccgctggcagccggacctgcgggggcgccccaccgcacgcacctgtacgtacgccgcctttgcagagctcggcatgatgcccgaggatagtccccgctgcctgcaccgcaccgagcgctttggggcggtcagcgtccccgttgtcatcctggaaggcgtggtgtggcgccccggcgagtggcgggcctgcgcgtgagcgtagcaaacgccccgcccacacaacgctccgcccccaaccccttccccgctgtcactcgttgttcgttgacccggacgtccgccaaataaagccactgaaacccgaaacgcgagtgttgtaacgtcctttgggcgggaggaagccacaaaatgcaaatgggatacatggaaggaacacacccccgtgactcaggacatcggcgtgtccttttgggtttcactgaaactggcccgcgccccacccctgcgcgatgtggataaaaagccagcgcgggtggtttagggtaccacaggtgggtgctttggaaacttgtcggtcgccgtgctcctgtgagcttgcgtccctccccggtttcctttgcgctcccgccttccggacctgctctcgcctatcttctttggctctcggtgcgattcgtcaggcagtggccttgtcgaatctcgaccccaccactcgccggacccgccgacgtcccctctcgagcccgccgaaacccgccgcgtctgttgaaatggccagccgccccgccgcatcctctcccgtcgaagcgcgggccccggttgggggacaggaggccggcggccccagcgcagccacccagggggaggccgccggggcccctctcgcccgcggccaccacgtgtactgccagcgagtcaatggcgtgatggtgctttccgacaagacgcccgggtccgcgtcctaccgcatcagcgatagcaactttgtccaatgtggttccaactgcaccatgatcatagacggagacgtggtgcgcgggcgcccccaggacccgggggccgcggcatcccccgctcccttcgttgcggtgacaaacatcggagccggcagcgacggcgggaccgccgtcgtggcattcgggggaaccccacgtcgctcggcggggacgtctaccggtacccagacgaccgacgtccccaccgaggcccttgggggcccccctcctcctccccgcttcaccctgggtggcggctgttgttcctgtcgcgacacacggcgccgctctgcggtattcgggggggagggggatcccgtcggccccgcggagttcgtctcggacgaccggtcgtccgattccgactcggatgactcggaggacaccgactcggagacgctgtcacacgcctcctcggacgtgtccggcggggccacgtacgacgacgcccttgactccgattcgtcatcggatgactccctgcagatagatggccccgtgtgtcgcccgtggagcaatgacaccgcgcccctggatgtttgccccgggacccccggcccgggcgccgacgccggtggtccctcagcggtagacccacacgcaccgacgccaggggccggcgctggtcttgcggccgatcccgccgtggcccgggacgacgcggaggggctttcggacccccggccacgtctgggaacgggcacggcctaccccgtccccctggaactcacgcccgagaacgcggaggccgtggcgcgctttctgggagatgccgtgaaccgcgaacccgcgctcatgctggagtacttttgccggtgcgcccgcgaggaaaccaagcgtgtcccccccaggacattctgcagcccccctcgcctcacggaggacgactttgggcttctcaactacgcgctcgtggagatgcagcgcctgtgtctggacgttcctccggtcctgccgaacgcatacatgccctattatctcagggagtatgtgacgcggctggtcaacgggttcaagccgctggtgagccggtccgctcgcctttaccgcatcctgggggttctggtgcacctgcggatccggacccgggaggcctcctttgaggagtggctgcgatccaaggaagtggccctggactttggcctgacggaaaggcttcgcgagcacgaagcccagctggtgatcctggcccaggctctggaccattacgactgtctgatccacagcacaccgcacacgctggtcgagcgggggctgcaatcggccctgaagtatgaggagttttacctaaagcgctttggcgggcactacatggagtccgtcttccagatgtacacccgcatcgccggctttttggcctgccgggccacgcgcggcatgcgccacatcgccctggggcgagaggggtcgtggtgggaaatgttcaagttctttttccaccgcctctacgaccaccagatcgtaccgtcgacccccgccatgctgaacctggggacccgcaactactacacctccagctgctacctggtaaacccccaggccaccacaaacaaggcgaccctgcgggccatcaccagcaacgtcagcgccatcctcgcccgcaacgggggcatcgggctatgcgtgcaggcgtttaacgactccggccccgggaccgctagcgtcatacccgccctcaaggtcctcgactcgctggtggcggcgcacaacaaagagagcgcgcgtccaaccggcgcgtgcgtgtacctggagccgtggcacaccgacgtgcgggccgtgctccggatgaagggggtcctcgccggcgaagaggcccagcgctgcgacaatatcttcagcgccctctggatgccagacctgtttttcaagcgcctgattcgccacctggacggcgagaagaacgtcacatggaccctgttcgaccgggacaccagcatgtcgctcgccgactttcacggggaggagttcgagaagctctaccagcacctcgaggtcatggggttcggcgagcagatacccatccaggagctggcctatggcattgtgcgcagtgcggccacgaccgggagccccttcgtcatgttcaaagacgcggtgaaccgccactacatctacgacacccagggggcggccatcgccggctccaacctctgcaccgagatcgtccatccggcctccaagcgatccagtggggtctgcaatctgggaagcgtgaatctggcccgatgcgtctccaggcagacgtttgactttgggcggctccgcgacgccgtgcaggcgtgcgtgctgatggtgaacatcatgatcgacagcacgctacaacccacgccccagtgcacccgcggcaacgacaacctgcggtccatgggaatcggcatgcagggcctgcacacggcctgcctgaagctggggctggatctggagtctgtcgaatttcaggacctgaacaaacacatcgccgaggtgatgctgctgtcggcgatgaagaccagcaacgcgctgtgcgttcgcggggcccgtcccttcaaccactttaagcgcagcatgtatcgcgccggccgctttcactgggagcgctttccggacgcccggccgcggtacgagggcgagtgggagatgctacgccagagcatgatgaaacacggcctgcgcaacagccagtttgtcgcgctgatgcccaccgccgcctcggcgcagatctcggacgtcagcgagggctttgcccccctgttcaccaacctgttcagcaaggtgacccgggacggcgagacgctgcgccccaacacgctcctgctaaaggaactggaacgcacgtttagcgggaagcgcctcctggaggtgatggacagtctcgacgccaagcagtggtccgtggcgcaggcgctcccgtgcctggagcccacccaccccctccggcgattcaagaccgcgtttgactacgaccagaagttgctgatcgacctgtgtgcggaccgcgccccctacgtcgaccatagccaatccatgaccctgtatgtcacggagaaggcggacgggaccctcccagcctccaccctggtccgccttctggtccacgcatataagcgcggactaaaaacagggatgtactactgcaaggttcgcaaggcgaccaacagcggggtctttggcggcgacgacaacattgtctgcacgagctgcgcgctgtgaccgacaaaccccctccgcgccaggcccgccgccactgtcgtcgccgtcccacgcgctcccccgctgccatggattccgcggccccagccctctcccccgctctgacggcccatacgggccagagcgcgccggcggacctggcgatccagattccaaagtgccccgaccccgagaggtacttctacacctcccagtgtcccgacattaaccacctgcgctccctcagcatccttaaccgctggctggaaaccgagcttgttttcgtgggggacgaggaggacgtctccaagctttccgagggcgagctcagcttttaccgcttcctcttcgctttcctgtcggccgccgacgacctggttacggaaaacctgggcggcctctccggcctgtttgagcagaaggacattctccactactacgtggagcaggaatgcatcgaagtcgtacactcgcgcgtgtacaacatcatccagctggtgctttttcacaacaacgaccaggcgcgccgcgagtacgtggccggcaccatcaaccacccggccatccgcgccaaggtggactggctggaagcgcgggtgcgggaatgcgcctccgttccggaaaagttcatcctcatgatcctcatcgagggcatcttttttgccgcctcgtttgccgccatcgcctaccttcgcaccaacaaccttctgcgggtcacctgccagtcaaacgacctcatcagccgggacgaggccgtgcacacgacggcctcgtgttacatctacaacaactacctcggcgggcacgccaagcccccgcccgaccgcgtgtacgggctgttccgccaggcggtcgagatcgagatcggatttatccgatcccaggcgccgacggacagccatatcctgagcccggcggcgctggcggccatcgaaaactacgtgcgattcagcgcggatcgcctgttgggccttatccacatgaagccactgttttccgccccaccccccgacgccagctttccgctgagcctcatgtccaccgacaaacacaccaattttttcgagtgtcgcagcacctcctacgccggggcggtcgtcaacgatctgtgagggtcgcggcgcgcttctacccgtgtttgcccataataaacctctgaaccaaactttgggtctcattgtgattcttgtcagggacgcgggggtgggagaggataaaaggcggcgcaaaaagcagtaaccaggtccgtccagattctgagggcataggataccataattttattggtgggtcgtttgttcggggacaagcgcgctcgtctgacgtttgggctactcgtcccagaatttggccaggacgtccttgtagaacgcgggtgggggggcctgggtccgcagctgctccagaaacctgtcggcgatatcaggggccgtgatatgccgggtcacaatagatcgcgccaggttttcgtcgcggatgtcctggtagataggcaggcgtttcagaagagtccacggcccccgctccttggggccgataagcgatatgacgtacttaatgtagcggtgttccaccagctcggtgatggtcatgggatcggggagccagtccagggactctggggcgtcgtggatgacgtggcgtcgccggctggccacataactgcggtgctcttccagcagctgcgcgttcgggacctggacgagctcgggcggggtgagtatctccgaggaggacgacctggggccggggtggcccccggtaacgtcccggggatccagggggaggtcctcgtcgtcttcgtatccgccggcgatctgttgggttagaatttcggtccacgagacgcgcatctcggtgccgccggcggccggcggcaaagggggcctggtttccgtggagcgcgagctggtgtgttcccggcggatggcccgccgggtctgagagcgactcgggggggtccagtgacattcgcgcagcacatcctccacggaggcgtaggtgttattgggatggaggtcggtgtggcagcggacaaagagggccaggaactgggggtagctcatcttaaagtactttagtatatcgcgacagttgatcgtgggaatgtagcaggcgctaatatccaacacaatatcacagcccatcaacaggaggtcagtgtctgtggtgtacacgtacgcgaccgtgttggtgtgatagaggttggcgcaggcatcgtccgcctccagctgacccgagttaatgtaggcgtaccccagggcccggagaacgcgaatacagaacagatgcgccagacgcagggccggcttcgagggcgcggcggacggcagcgcggctccggacccggccgtcccccgggtccccgaggccagagaggtgccgcgccggcgcatgttggaaaaggcagagctgggtctggagtcggtgatgggggaaggcggtggagaggcgtccacgtcactggcctcctcgtccgtccggcattgggccgtcgtgcgggccaggatggccttggctccaaacacaaccggctccatacaattgaccccgcgatcggtaacgaagatggggaaaagggacttttgggtaaacacctttaataagcgacagaggcagtgtagcgtaatggcctcgcggtcgtaactggggtatcggcgctgatatttgaccaccaacgtgtacatgacgttccacaggtccacggcgatgggggtgaagtacccggccggggccccaaggccctggcgcttgaccagatggtgtgtgtgggcaaacttcatcatcccgaacaaacccatgtcaggtcgattgtaactgcggatcggcctaactaaggcgtggttggtgcgacggtccgggacacccgagcctgtctctctgtgtatggtgacccagacaacaacaccgacacaagaggacaataatccgttaggggacgctctttataatttcgatggcccaactccacgcggattggtgcagcaccctgcatgcgccggtgtgggccaaacttccccccgctcattgcctcttccaaaagggtgtggcctaacgagctgggggcgtatttaatcaggctagcgcggcgggcctgccgtagtttctggctcggtgagcgacggtccggttgcttgggtcccctggctgccagcaaaaccccaccctcgcagcggcatacgccccctccgcgtcccgcacccgagaccccggcccggctgccctcaccaccgaagcccacctcgtcactgtggggtgttcccagcccgcattgggatgacggattcccctggcggtgtggcccccgcctcccccgtggaggacgcgtcggacgcgtccctcgggcagccggaggagggggcgccctgccaggtggtcctgcagggcgccgaacttaatggaatcctacaggcgtttgccccgctgcgcacgagccttctggactcgcttctggttatgggcgaccggggcatccttatccataacacgatctttggggagcaggtgttcctgcccctggaacactcgcaattcagtcggtatcgctggcgcggacccacggcggcgttcctgtctctcgtggaccagaagcgctccctcctgagcgtgtttcgcgccaaccagtacccggacctacgtcgggtggagttggcgatcacgggccaggccccgtttcgcacgctggttcagcgcatatggacgacgacgtccgacggcgaggccgttgagctagccagcgagacgctgatgaagcgcgaactgacgagctttgtggtgctggttccccagggaacccccgacgttcagttgcgcctgacgaggccgcagctcaccaaggtccttaacgcgaccggggccgatagtgccacgcccaccacgttcgagctcggggttaacggcaaattttccgtgttcaccacgagtacctgcgtcacatttgctgcccgcgaggagggcgtgtcgtccagcaccagcacccaggtccagatcctgtccaacgcgctcaccaaggcgggccaggcggccgccaacgccaagacggtgtacggggaaaatacccatcgcaccttctctgtggtcgtcgacgattgcagcatgcgggcggtgctccggcgactgcaggtcgccgggggcaccctcaagttcttcctcacgacccccgtccccagtctgtgcgtcaccgccaccggtcccaacgcggtatcggcggtatttctcctgaaaccccagaagatttgcctggactggctgggtcatagccaggggtctccttcagccgggagctcggcctcccgggcctctgggagcgagccaacagacagccaggactccgcgtcggacgcggtcagccacggcgatccggaagacctcgatggcgctgcccgggcgggagaggcgggggcctcgcacgcctgtccgatgccgtcgtcgaccacgcgggtcactcccacgaccaagcgggggcgctcggggggcgaggatgcgcgcgcggacacggccctaaagaaacctaagacggggtcgcccaccgcacccccgcccacagatccagtccccctggacacggaggacgactccgatgcggcggacgggacggcggcccgtcccgccgctccagacgcccggagcggaagccgttacgcgtgttactttcgcgacctcccgaccggagaagcaagccccggcgccttctccgccttccgggggggcccccaaaccccgtatggttttggattcccctgacggggcggggccttggcggccgcccaactctcgcaccatcccgggttaatgtaaataaacttggtattgcccaacactctcccgcgtgtcgcgtgtggttcatgtgtgtgcctggcgtcccccaccctcgggttcgtgtatttcctttccctgtccttataaaagccgtatgtggggcgctgacggaaccaccccgcgtgccatcacggccaaggcgcgggatgctccgcaacgacagccaccgggccgcgtccccggaggacggccagggacgggtcgacgacggacggccacacctcgcgtgcgtgggggccctggcgcgggggttcatgcatatctggcttcaggccgccacgctgggttttgcgggatcggtcgttatgtcgcgcgggccgtacgcgaatgccgcgtctggggcgttcgccgtcgggtgcgccgtgctgggctttatgcgcgcaccccctcccctcgcgcggcccaccgcgcggatatacgcctggctcaaactggcggccggtggagcggcccttgttctgtggagtctcggggagcccggaacgcagccgggggccccgggcccggccacccagtgcctggcgctgggcgccgcctatgcggcgctcctggtgctcgccgatgacgtctatccgctctttctcctcgccccggggcccctgttcgtcggcaccctggggatggtcgtcggcgggctgacgatcggaggcagcgcgcgctactggtggatcggtgggcccgccgcggccgccttggccgcggcggtgttggcgggcccgggggcgaccaccgccagggactgcttctccagggcgtgccccgaccaccgccgcgtctgcgtcatcgtcgcaggcgagtctgtttcccgccgccccccggaggacccagagcgacccggggaccccgggccaccgtcccccccgacaccccaacgatcccaggggccgccggccgatgaggtcgcaccggccggggtagcgcggcccgaaaacgtctgggtgcccgtggtcacctttctgggggcgggcgcgctcgccgtcaagacggtgcgagaacatgcccgggaaacgccgggcccgggcctgccgctgtggccccaggtgtttctcggaggccatgtggcggtggccctgacggagctgtgtcaggcgcttatgccctgggaccttacggacccgctgctgtttgttcacgccggactgcaggtcatcaacctcgggttggtgtttcggttttccgaggttgtcgtgtatgcggcgctagggggtgccgtgtggatttcgttggcgcaggtgctggggctccggcgtcgcctgcacaggaaggaccccggggacggggcccggttggcggcgacgcttcggggcctcttcttctccgtgtacgcgctggggtttggggtgggggcgctgctgtgccctccggggtcaacgggcgggtggtcgggcgattgatatatttttcaataaaaggcattagtcccgaagaccgccggtgtgtgatgatttcgccataacacccaaaccccggatggggcccgggtataaattccggaaggggacacgggctaccctcactaccgagggcgcttggtcgggaggccgcatcgaacgcacacccccatccggtggtccgtgtggaggtcgtttttcagtgcccggtctcgctttgccgggaacgctagccgatccctcgcgagggggaggcgtcgggcatggccccggggcgggtgggccttgccgtggtcctgtggagcctgttgtggctcggggcgggggtggccgggggctcggaaactgcctccaccgggcccacgatcaccgcgggagcggtgacgaacgcgagcgaggcccccacatcggggtcccccgggtcagccgccagcccggaagtcacccccacatcgaccccaaaccccaacaatgtcacacaaaacaaaaccacccccaccgagccggccagccccccaacaacccccaagcccacctccacgcccaaaagcccccccacgtccacccccgaccccaaacccaagaacaacaccacccccgccaagtcgggccgccccactaaaccccccgggcccgtgtggtgcgaccgccgcgacccattggcccggtacggctcgcgggtgcagatccgatgccggtttcggaattccacccgcatggagttccgcctccagatatggcgttactccatgggtccgtcccccccaatcgctccggctcccgacctagaggaggtcctgacgaacatcaccgccccacccgggggactcctggtgtacgacagcgcccccaacctgacggacccccacgtgctctgggcggagggggccggcccgggcgccgaccctccgttgtattctgtcaccgggccgctgccgacccagcggctgattatcggcgaggtgacgcccgcgacccagggaatgtattacttggcctggggccggatggacagcccgcacgagtacgggacgtgggtgcgcgtccgcatgttccgccccccgtctctgaccctccagccccacgcggtgatggagggtcagccgttcaaggcgacgtgcacggccgccgcctactacccgcgtaaccccgtggagtttgtctggttcgaggacgaccgccaggtgtttaacccgggccagatcgacacgcagacgcacgagcaccccgacgggttcaccacagtctctaccgtgacctccgaggctgtcggcggccaggtccccccgcggaccttcacctgccagatgacgtggcaccgcgactccgtgatgttctcgcgacgcaatgccaccgggctggccctggtgctgccgcggccaaccatcaccatggaatttggggtccggcatgtggtctgcacggccggctgcgtccccgagggcgtgacgtttgcctggttcctgggggacgacccctcaccggcggctaagtcggccgttacggcccaggagtcgtgcgaccaccccgggctggctacggtccggtccaccctgcccatttcgtacgactacagcgagtacatctgtcggttgaccggatatccggccgggattcccgttctagagcaccacggcagtcaccagcccccacccagggaccccaccgagcggcaggtgatcgaggcgatcgagtgggtggggattggaatcggggttctcgcggcgggggtcctggtcgtaacggcaatcgtgtacgtcgtccgcacatcacagtcgcggcagcgtcatcggcggtaacgcgagacccccccgttacctttttaatatctatatagtttggtccccctctatcccgcccaccgctgggcgctataaagccgccaccctctcttccctcaggtcatccttggtcgatcccgaacgacacacggcgtggagcaaaacgcctccccctgagccgctttcctaccaacacaacggcatgcctctgcgggcatcggaacacgcctaccggcccctgggccccgggacaccccccatgcgggctcggctccccgccgcggcctgggttggcgtcgggaccatcatcgggggagttgtgatcattgccgcgttggtcctcgtgccctcgcgggcctcgtgggcactttccccatgcgacagcggatggcacgagttcaacctcgggtgcatatcctgggatccgacccccatggagcacgagcaggcggtcggcggctgtagcgccccggcgaccctgatcccccgcgcggctgccaaacagctggccgccgtcgcacgcgtccagtcggcaagatcctcgggctactggtgggtgagcggagacggcattcgggcctgcctgcggctcgtcgacggcgtcggcggtattgaccagttttgcgaggagcccgcccttcgcatatgctactatccccgcagtcccgggggctttgttcagtttgtaacttcgacccgcaacgcgctggggctgccgtgaggcgcgtgtactgcggtctgtctcgtctcctcttctccccttccctccccctccgcatcccaggatcacaccggccaacgagggttgggggggtccggcacggacccaaaataataaacacacaatcacgtgcgataaaaagaacacgcggtcccctgtggtgtttttggttatttttattaaatctcgtcgacaaacagggggaaaggggcgtggtctagcgacggcagcacgggcggaggcgttcaccggctccggcgtccttcgcgtttaagcttggtcaggagggcgctcagggcggcgacgttggtcgggccgtcgttggtcagggcgttggctcgatggcgggcgaggacgggcgaggggctcaacggcgggggcgggggtccggtgcggcccgggggggaaaatagggcggatcccccccagtcgtacaggggattttccgcctcaatgtacggggaggccggcgctgcattcgccgtgttcacgcagacgttttcgtagacccgcatccatggtatttcctcgtagacacgccccccgtcctcgctcacggtctcgtatattgactcgtcgtcctcgtagggggcgtgccgttcgcgggccgaggcggcgtgggtggctttgcggcgggcgtcgtcgtcgtcgtcgtcggccgtcagatacgtggcttccatctggtcgggttctccctccggggcgggtccccacacccgtggccgatcgaggctccccagagacgcgcgccggacaagaagggggcacgtcgccgccggcggtcgcctgtcgggtcccgcgacgttacgggccgggaggcgcgggggcacctcccccatgtgcgtgtaatacgtggccggctgtgcggccgcagcggggggctcggcgaccgggtcgtccgcatccggaagcgggggccccgcgccgtccgcacggcgcctccggaaccgccgggtggacggcgcgggggtcgagtgtaggcgaggtcgggggaggggcgggggctcgttgtcgcgccgcgcccgctgaatcttttcccgacaggtcccaccccccgcgcgatgcccccccgggccgcgggccatgtcgtccgggggaggccccgcggaccacgtcgtccggcgagacgccacgagccgcaggatggactcgtagtggagcgacggcgccccgctgcggagcagatccgcggccagggcggccccgaaccaagccttgatgctcaactccatccgggcccagctgggggcggtcatcgtggggaacaggggggcggtggtccgacagaaacgctcctggctgtccaccgcggcccgcagatactcgttgttcaggctgtcggtggcccagacgccgtacccggtgagggtcgcgttgatgatatactgggcgtggtgatggacgatcgacagaacctccaccgtggataccacggtatccacggtcccgtacgtaccgccgctccgcttgccggtctgccacaggttggctaggcacgtcaggtggcccaggacgtcgctgaccgccgccctgagcgccatgcactgcatggagccggtcgtgccgctgggaccccggtccagatggcgcgcgaacgtttccgcgggcgcctccgggctgccgccgagcgggaggaaccggcgattggagggactcagccggtgacatacgtgcttgtccgtcgtccacagcatccaggacgcccaccggtacagcacggagacgtaggccaggagctcgttgagccgcagtgcggtgtcggtgctggggcggcttgggtccgccgggcgcataaagaacatgtactgctgaatccgatggagggcgtcgcgcaggccggccacggtggcggcgtacttggccgccgcggccccgctcttgaacggggtgcgcgccagcagctttggcgccagggtgggccgcagcagcacgtgaaggctggggtcgcagtcgcccacggggtcctcggggacgtccaggccgctgggcaccaccgtctgcaggtacttccagtactgcgtgaggatggcgcggctcaactggccgccgggcagctccacctcgcccagcgcctgggtggcggccgaagcgtagtgccggatgtactcgtagtgcgggtcgctggcgagcccgtccacgatcaaactctcgggaaccgtgttgtgttgccgcgcggccaaccggacgctgcgatcggtgcaggtcagaaacgccggctgcgcgtcgtcggagcgctgccgcaaggcgcccacggccgcgctaaggagcccctccggggtggggagcagacacccgccgaagatgcgccgctcgggaacgcccgcgttgtcgccgcggatcaggttggcaggcgtcaggcaccgcgccagccgcagggagctcgcgccgcgcgtccggcgctgcatggtgacgcccgttcggtcgggacccgccggtcggagttatgccgcgtccagggccatcggggcgctttttatcgggaggagcttatgggcgtggcgggcctcccagcccggtcgcgcgcctccccgacacgtgcgcccgcagggcggcggccccctcgtctcccatcagcagtttcctaaactgggacatgatgtccaccacgcggacccgcgggcccaacacggacccgccgcttacgggggcgggggggaagggctccaggtccttgagcagaaaggcggggtctgccgtcccggacacgggggcccggggcgcggaggaggcggggcgcagatccacgtgctccgcggccgcgcggacgtccgcccagaacttggcgggggtggtgcgcgcgtacaggggctgggtcgctcggaggacacacgcgtagcgcaggggggtgtacgtgcccacctcgggggccgtgaatcccccgtcaaacgcggccagtgtcacgcacgccaccacggtgtcggcaaagcccagcagccgctgcaggacgagcccggcggccagaatggcgcgcgtggtcgcagcgtcgtcccggcgccggtgcgcgtccccgcacgcccgggcgtactttaaggtcactgtcgccagggccgtgtgcagcgcgtacaccgcagcgcccagcacggcgttgagcccgctgttggcgagcagccggcgcgctgcggtgtcgcccagcgcctcgtgctcggcccccacgaccgcggggcttcccaggggcagggcgcgaaacagctcctcccgcgccacgtccgcaaaggcggggtggtgcacgtgcgggtgcaggcgcgcccccacgaccaccgagagccactggaccgtctgctccgccatcaccgccaacacatccagcacgcgccccaggaaggcggcctcccgcgtcaaaacgcaccggacggcgtcgggattgaagcgggcgagcagggccccggtggccaggtacgtcatgcggccggcatagcgggcggccacgcgacagtcgcggtccagcagcgcgcgcaccccgggccagtacagcagggaccccagcgagctgcgaaacaccgcggcgtcggggccggattggggggacactaacccccccgcgctcagtaacggcacggccgcggccccgacgggacgcaacgccgtgaggctcgcgaactgccgcctcagctcggcagccctgtcgtccaggtccgacccgcgcgcctctgcgtgaaggcgcgtcccgcacacccacccgttgatggccagccgcacgacggcatccgccaaaaagctcatcgcctgggcggggctggtttttgttcgacgatccgtcaggtcaagaatcccatcgcccgtgatataccaggccaacgcctcgccctgctgcagggtttggcggaaaaacaccgcggggttgtcgggggaggcgaagtgcatgacccccacgcgcgataacccgaacgcgctatccggacacgggtaaaacccggccggatgccccagggctagggcggagcgcacggactcgtcccacacggcaacctgaggggccagtcgatccaacgggaatgccgcccggagctccgggcccggcacgcgtccctccagaacctccaccttgggcggggaacgggccccgccgccgtcctccggcccgacgtcttccgggtagtcgtcctcctcgtactgcagttcctctaggaacagcggcgacggcgccacccgcgaaccgccgacccgccccaaaatagcccgcgcgtcgacgggacccaggtatcccccctgccgggcctgcggaggaccgcggggaacctcatcatcatcgtccaggcgaccgcgcaccgactggctacgggccgcatcgggcccggggcgctgccgggacgctcggcgatgggatgagggcggggcttccgacgcgcgccgtcgtcgggctcgcgggccttcccgtcgacggcgcacgggcggctcgtcgcccgccatctcctccagagcctctagctcgctgtcgtcatccccgcggaacaccgcacgcaggtaccccatgaaccccaccccatcgcccgctggctcgtccgccacgggcgaggcgcgggggcgggtggatgcgcgcctcctgcgccccgcgggttcgcgagccgacatggtggcgatagacgcgggttatcggatgtccgctaccccccaaaaaagaaaaagaccccacagcgcggatggaggtcggggtaggtgccgccggaccccctcgcgatgggaatggacgggagcgacggggccggcgcaaaaaacgcagtatctcccgcgaaggctacccgccgccccagcccccggccaaatgcggaaacggtcccgcgctctcgcctttatacgcgggccgccctgcgacacaatcacccgtccgtggtttcgaatctacacgacaggcccgcagacgcggctaacacacacgccggcaacccagaccccagtgggttggttgcgcggtcccgtctcctggctagttctttcccccaccaccaaataatcagacgacaaccgcaggtttttgtaatgtatgtgctcgtgtttattgtggatacgaaccggggacgggaggggaaaacccagacgggggatgcgggtccggtcgcgccccctatgggtggggttgatacgggaaagacgatatcgggcttttgatgcgatcgtccccgcccgcccagagagtgtgggacgcccgacggcgcgggaagagaaaaacccccaaacgcgttagaggaccggacggaccttatggggggaagtgggcagcgggaaccccgtccgttcccgaggaatgacagcccgtggtcgccaccccgcatttaagcaacccgcacgggccgccccgtacctcgtgacttccccccacattggctcctgtcacgtgaaggcaaaccgagggcggctgtccaacccaccccccgccacccagtcacggtccccgtcggattgggaaacaaaggcacgcaacgccaacaccgaatgaacccctgttggtgctttattgtctgggtacggaagtttttcactcgacgggccgtctggggcgagaagcggagcgggctggggctcgaggtcgctcggtggggcgcgacgccgcagaacgccctcgagtcgccgtggccgcgtcgacgtcctgcaccacgtctggattcaccaactcgttggcgcgctgaatcaggtttttgccctcgcagaccgtcacgcggatggtggtgatgccaaggagttcgttgaggtcttcgtctgtgcgcggacgcgacatgtcccagagctggaccgccgccatccgggcatgcatggccgccaggcgcccaaccgcggcgcagaagacgcgcttgttaaagccggccacccggggggtccatggcgcgtcggggtttgggggggcggtgctaaagtgcagctttctggccagcccctgcgcgggtgtcttggatcgggttggcgccgtcgacgcgggggcgtctgggagtgcggcggattctggctgggccgatttcctgccgcgggtggtctccgccgccggggccgcgggggccttagtcgccacccgctgggttcggggggcccggggggcggtggtgggtgtgcgtccggcccctccggacccagcgggcggcggaggcgcccgcgcaggccccggggcggacaaaaccgccccggaaacgggacgccgcgtccgggggacctccgggtgttcgtcgtcttcggatgacgagcccccgtagagggcataatccgactcgtcgtactggacgaaacggacctcgccccttgggcgcgcgcgtgtctgtagggcgccacggcgggaggtgtcaggcggactatcgggactcgccatacatgaagacggggtgtagtacagatcctcgtactcatcgcgcggaacctcccgcggacccgacttcacggagcggcgagaggtcatggttccacgaacacgctagggtcggatgcgcggacaattaggcctgggttcggacggcgggggtggtgcaggtgtggagaggtcgagcgataggggcggcccgggagagaagagagggtccgcaaaacccactggggatgcgtgagtggccctctgtgggcggtgggggagagtcttataggaagtgcatataaccacaacccatgggtctaaccaatccccaggggccaagaaacagacacgccccaaacggtctcggtttccgcgaggaaggggaagtcctgggacaccctccacccccacccctcaccccacacagggcgggttcaggcgtgcccggcagccagtagcctctggcagatctgacagacgtgtgcgataatacacacgcccatcgaggccatgcctacataaaagggcaccagggcccccggggcagacatttggccagcgttttgggtctcgcaccgcgcgcccccgatcccatcgcgcccgccctcctcgccgggcggctccccgtgcgggcccgcgtctcccgccgctaaggcgacgagcaagacaaacaacaggcccgcccgacagacccttctgggggggcccatcgtccctaacaggaagatgagtcagtggggatccggggcgatccttgtccagccggacagcttgggtcgggggtacgatggcgactggcacacggccgtcgctactcgcgggggcggagtcgtgcaactgaacctggtcaacaggcgcgcggtggcttttatgccgaaggtcagcggggactccggatgggccgtcgggcgcgtctctctggacctgcgaatggctatgccggctgacttttgtgcgattattcacgcccccgcgctatccagcccagggcaccacgtaatactgggtcttatcgactcggggtaccgcggaaccgttatggccgtggtcgtagcgcctaaaaggacgcgggaatttgcccccgggaccctgcgggtcgacgtgacgttcctggacatcctggcgacccccccggccctcaccgagccgatttccctgcggcagttcccgcaactggcgcccccccctccaaccggggccgggatacgcgcagatccttggttggagggggcgctcggggacccaagcgtgactcctgccctaccggcgcgacgccgagggcggtccctcgtctatgccggcgagctgacgccggttcagacggaacacggggacggcgtacgagaagccatcgccttccttccaaaacgcgaggaggatgccggtttcgacattgtcgtccgtcgcccggtcaccgtcccggcaaacggcaccacggtcgtgcagccatccctccgcatgctccacgcggacgccgggcccgcggcctgctatgtgctggggcggtcgtcgctcaacgcccgcggcctcctggtcgttcctacgcgctggctccccgggcacgtatgtgcgtttgttgtttacaaccttacgggggttcctgtgaccctcgaggccggcgccaaggtcgcccagctcctggttgcgggggcggacgctcttccttggatccccccggacaactttcacgggaccaaagcgcttcgaaactaccccaggggtgttccggactcaaccgccgaacccaggaacccgccgctcctggtgtttacgaacgagtttgacgcggaggcccccccgagcgagcgcgggaccgggggttttggctctaccggtatttagcccatagcttggggttcgttccgggcaataaaaaacgtttgtatctcatctttcctgtgtgtagttgtttctgttggatgcctgtgggtctatcacacccgcccctccatcccacaaacacagaacacacgggttggatgaaaacacgcatttattgacccaaaacacacggagctgctcgagatgggccagggcgaggtgcggttggggaggctgtaggtctgggaacggacacgcggggacacgattccggtttggggtccgggagggcgtcgccgtttcgggcggcaggcgccagcgtaacctccgggggcggcgtgtgggggtgccccaaggagggcgcctcggtcaccccaagcccccccgagcgggttcccccggcaaccccgaaggcggagaggccaagggcccgttcggcgatggccacatcctccatgaccacgtcgctctcggccatgctccgaatagcctgggagacgagcacatccgcggacttgtcagccgcccccacggacatgtacatctgcaggatggtggccatacacgtgtccgccaggcgccgcatcttgtcctgatgggccgccacggccccgtcgatcgtgggggcctcgagcccggggtggtggcgcgccagtcgttctaggttcaccatgcaggcgtggtacgtgcgggccaaggcgcgggccttcacgaggcgtcgggtgtcgtccagggaccccagggcgtcatcgagcgtgatgggggcgggaagtagcgcgttaacgaccaccagggcctcctgcagccgcggctccgcctccgagggcggaacggccgcgcggatcatctcatattgttcctcggggcgcgctccccagccacatatagccccgagaagagaagccatcgcgggcgggtactggcccttgggcgcgcggacgcaatggggcaggaagacgggaaccgcggggagaggcgggcggccgggactcccgtggaggtgaccgcgctttatgcgaccgacgggtgcgttattacctcttcgatcgccctcctcacaaactctctactgggggccgagccggtttatatattcagctacgacgcatacacgcacgatggccgtgccgacgggcccacggagcaagacaggttcgaagagagtcgggcgctctaccaagcgtcgggcgggctaaatggcgactccttccgagtaaccttttgtttattggggacggaagtgggtgggacccaccaggcccgcgggcgaacccgacccatgttcgtctgtcgcttcgagcgagcggacgacgtcgccgcgctacaggacgccctggcgcacgggaccccgctacaaccggaccacatcgccgccaccctggacgcggaggccacgttcgcgctgcatgcgaacatgatcctggctctcaccgtggccgtcaacaacgccagcccccgcaccggacgcgacgccgccgcggcgcagtatgatcagggcgcgtccctacgctcgctcgtggggcgcacgtccctgggacaacgcggccttaccacgctatacgtccaccacgaggcgcgcgtgctggccgcgtaccgcagggcgtattatggaagcgcgcagagtcccttctggtttcttagcaaattcgggcctgacgaaaaaagcctggtgctcaccactcggtactacctgcttcaggcccagcgtctggggggcgcgggggccacgtacgacctgcaggccatcaaggacatctgcgccacctacgcgattccccacgccccccgccccgacaccgtcagcgccgcgtccctgacctcgtttgccgccatcacgcggttctgttgcacgagccagtacgcccgcggggccgcggcggccgggtttccgctttacgtggagcgccgtattgcggccgacgtccgcgagaccagtgcgctggagaagttcataacccacgatcgcagttgcctgcgcgtgtccgaccgtgaattcattacgtacatttacctggcccattttgagtgtttcagccccccgcgcctagccacgcatcttcgggccgtgacgacccaggaccccaaccccgcggccaacacggagcagccctcgcccctgggcagggaggccgtggaacaatttttttgccacgtgcgcgcccaactgaatatcggggagtacgtcaaacacaacgtgaccccccgggagaccgtcctggatggcgatacggccaaggcctacctgcgcgctcgcacgtacgcgcccggggccctgacgcccgcccccgcgtattgcggggccgtggactccgccaccaaaatgatggggcgtttggcggacgccgaaaagctcctggtcccccgcgggtggcccgcgtttgcgcccgccagtcccggggaggatacggcgggcggcacgccgcccccacagacctgcggaatcgtcaagcgcctcctgagactggccgccacggaacaacaggacaccacgcccccggcgatcgcggcgcttatccgtaatgcggcggtgcagactcccctgcccgtctaccggatatccatggtccccacgggacaggcatttgccgcgctggcctgggacgactgggcccgcataacgcgggacgctcgcctggccgaagcggtcgtgtccgccgaagcggcggcgcaccccgaccacggcgcgctgggcaggcggctcacggatcgcatccgcgcccagggccccgtgatgccccctggcggcctggatgccggggggcagatgtacgtgaatcgcaacgagatatttaacggcgcgctggcaatcacaaacatcatcctggatctcgacatcgccctgaaggagcccgtcccctttcgccggctccacgaggccctgggccactttaggcgcggggctctggcggcggttcagctcctgtttcccgcggcccgcgtggaccccgacgcatatccctgttattttttcaaaagcgcatgtcggcccggcccggcgtccgtgggttccggcagcggactcggcaacgacgacgacggggactggtttccctgctacgacgacgccggtgatgaggagtgggcggaggacccgggcgccatggacacatcccacgatcccccggacgacgaggttgcctactttgacctgtgccacgaagtcggccccacggcggaacctcgcgaaacggattcgcccgtgtgttcctgcaccgacaagatcggactgcgggtgtgcatgcccgtccccgccccgtacgtcgtccacggttctctaacgatgcggggggtggcacgggtcatccagcaggcggtgctgttggaccgagattttgtggaggccatcgggagctacgtaaaaaacttcctgttgatcgatacgggggtgtacgcccacggccacagcctgcgtttgccgtattttgccaaaatcgcccccgacgggcctgcgtgcggaaggctgctgccagtgtttgtgatcccccccgcctgcaaagacgttccggcgtttgtcgccgcgcacgccgacccgcggcgcttccattttcacgccccgcccacctatctcgcttccccccgggagatccgtgtcctgcacagcctgggtggggactatgtgagcttctttgaaaggaaggcgtcccgcaacgcgctggaacactttgggcgacgcgagaccctgacggaggtcctgggtcggtacaacgtacagccggatgcgggggggaccgtcgaggggttcgcatcggaactgctggggcggatagtcgcgtgcatcgaaacccactttcccgaacacgccggcgaatatcaggccgtatccgtccggcgggccgtcagtaaggacgactgggtcctcctacagctagtccccgttcgcggtaccctgcagcaaagcctgtcgtgtctgcgctttaagcacggccgggcgagtcgcgccacggcgcggacattcgtcgcgctgagcgtcggggccaacaaccgcctgtgcgtgtccttgtgtcagcagtgctttgccgccaaatgcgacagcaaccgcctgcacacgctgtttaccattgacgccggcacgccatgctcgccgtccgttccctgcagcacctctcaaccgtcgtcttgataacggcgtacggcctcgtgctcgtgtggtacaccgtcttcggtgccagtccgctgcaccgatgtatttacgcggtacgccccaccggcaccaacaacgacaccgccctcgtgtggatgaaaatgaaccagaccctattgtttctgggggccccgacgcacccccccaacgggggctggcgcaaccacgcccatatctgctacgccaatcttatcgcgggtagggtcgtgcccttccaggtcccacccgacgccacgaatcgtcggatcatgaacgtccacgaggcagttaactgtctggagaccctatggtacacacgggtgcgtctggtggtcgtagggtggttcctgtatctggcgttcgtcgccctccaccaacgccgatgtatgtttggtgtcgtgagtcccgcccacaagatggtggccccggccacctacctcttgaactacgcaggccgcatcgtatcgagcgtgttcctgcagtacccctacacgaaaattacccgcctgctctgcgagctgtcggtccagcggcaaaacctggttcagttgtttgagacggacccggtcaccttcttgtaccaccgccccgccatcggggtcatcgtaggctgcgagttgatgctacgctttgtggccgtgggtctcatcgtcggcaccgctttcatatcccggggggcatgtgcgatcacataccccctgtttctgaccatcaccacctggtgttttgtctccaccatcggcctgacagagctgtattgtattctgcggcggggcccggcccccaagaacgcagacaaggccgccgccccggggcgatccaaggggctgtcgggcgtctgcgggcgctgttgttccatcatcctgtcgggcatcgcaatgcgattgtgttatatcgccgtggtggccggggtggtgctcgtggcgcttcactacgagcaggagatccagaggcgcctgtttgatgtatgacgtcacatccaggccggcggaaaccggaacggcatatgcaaactggaaactgtcctgtcttggggcccacccacccgacgcgtcatatgtaaatgaaaatcgttcccccgaggccatgtgtagcctggatcccaacgaccccgcccatgggtcccaattggccgtcccgttaccaagaccaacccagccagcgtatccacccccgcccgggtccccgcggaagcggaacggtgtatgtgatatgctaattaaatacatgccacgtacttatggtgtctgattggtccttgtctgtgccggaggtggggcgggggccccgcccggggggcggaactaggaggggtttgggagagccggccccggcaccacgggtataaggacatccaccacccggccggtggtggtgtgcagccgtgttccaaccacggtcacgcttcggtgcctctccccgattcgggcccggtcgcttgctaccggtgcgccaccaccagaggccatatccgacaccccagccccgacggcagccgacagcccggtcgtacaataaaaacaaaacatttcaaacaaatcgccccacgtgttgtccttctttgctcatggccggcggggcgtgggtcacggcagatggcgggggtgggcccggcgtacggcctgggtgggcggagggaactaacccaacgtataaatccgtccccgctccaaggccggtgtcatagtgcccttaggagcttcccgcccgggcgcatccccccttttgcactatgacagcgacccccctcaccaacctgttcttacgggccccggacataacccacgtggcccccccttactgcctcaacgccacctggcaggccgaaacggccatgcacaccagcaaaacggactccgcttgcgtggccgtgcggagttacctggtccgcgcctcctgtgagaccagcggcacaatccactgctttttctttgcggtatacaaggacacccaccatacccctccgctgattaccgagctccgcaactttgcggacctggttaaccacccgccggtcctacgcgaactggaggataagcgcggggtgcggctgcggtgtgcgcggccgtttagcgtcgggacgattaaggacgtctctgggtccggcgcgtcctcggcgggagagtacacgataaacgggatcgtgtaccactgccactgtcggtatccgttctcaaaaacatgctggatgggggcctccgcggccctacagcacctgcgctccatcagctccagcggcatggccgcccgcgcggcagagcatcgacgcgtcaagattaaaattaaggcgtgatctccaaccccccatgaatgtgtgtaaccccccccaaaaaaataaagagccgtaacccaaccaaaccaggcgtggtgtgagtttgtggacccaaagccctcagagacaatgcgacaggccagtatggaccgtgatacttttatttattaactcacaggggcgcttaccgccacaggaataccagaataatgaccaccacaatcgcgaccaccccaaatacagcatggcgccacaccacgccacaacagccctgtcgccggtatggggcatgatcagacgagccgcgcgccgcgcgttgggccctgtacagctcgcgcgaattgaccctaggaggccgccacgcgcccgagttttgcgttcgtcgctggtcgtcgggcgccaaagccccggacggctgttcggtcgaacgaacggccacgacagtggcataggttggggggtggtccgacatagcctcggcgtacgtcgggaggcccgacaagaggtcccttgtgatgtcgggtggggccacaagcctggtttccggaagaaacaggggggttgccaataacccgccagggccaaaactccggcgctgcgcacgtcgttcggcgcggcgccgggcgcgccgagcggctcgctgggcggcttggcgtgagcggccccgctccgacgcctcgccctctccggaggaggttggcggaattggcacggacgacaggggcccagcagagtacggtggaggtgggtccgtgggggtgtccagatcaataacgacaaacggcccctcgttcctaccagacaagctatcgtaggggggcgggggatcagcaaacgcgttccccgcgctccatagacccgcgtcgggttgcgccgcctccgaagccatggatgcgccccaaagccacgactcccgcgcgctaggtccttggggtaagggaaaaggccctactccccatccaagccagccaagttaacgggctacgccttcggggatgggactggcaccccggcggattttgttgggctggtacgcgtcgcccaaccgagggccgcgtccacgggacgcgccttttataaccccgggggtcattcccaacgatcacatgcaatctaacgagtcttcggacctcgcgggggccgcttaagcggtggttagggtttgtctgacgcggggggagggggaaggaacgaaacactctcattcggaggcagctcggggtttggtcttggtggccacgggcacgcagaagagcgccgcgatcctcttaagcacccccccgccctccgtggaggcgggggtttggtcggcgggtggtacctggcgggccgctggctcgggcgggtcgcgcgccccagagtgtgaccttttcggtctgctcgcagacccccgggcagcgccgccgcggcggcgacgggctcgctgggtcctaggctccatggggaccgtatacgtggacaggctctggagcatccgcacgactgcggtgatattaccggagaccttctgcgggacgagccgggtcacgcggctgacgcggagcgtccgttgggcgacaaacaccaggacggggcacaggtacactatcttgtcacccggaggcgcgagggactgcaggagcttcagggagtggcgcagctgcttcatccccgtggcccgttgctcgcgtttgctggcggtgtccccggaagaaatatatttgcatgtctttagttctatgatgacacaaaccccgcccagcgtcttgtcattggcgaattcgaacacgcagatgcagtcggggcggcgcggtcccaggtccacttcgcatattaaggtgacgcgtgtggcctcgaacaccgagcgaccctgcagcgacccgcttaaaccggtccgccttttttgcacgggtaagcaccttgggtgggcggaggaggggggacgcgggggcggaggaggggggacgcgggggcggaggaggggggacgcgggggcggaggaggggggacgcgggggcggaggaggggggacgcggggggcggaggaggggggacgcagggggcggaggaggggggacgcgggggcggaggaggggggacgcgggggcggaggagggggctcacccgcgttcgtgccttcccgcaggaggaacgccctcgtcgaggcgaccggcggcgaccgttgcgtggaccgcttcctgctcgtcgggggggggggggggagccactgtggtcctccgggacgttttctggatggccgacatttccccaggcgcttttgtgccttgtgtaaaagcgcggcgtcccgctctccgatccccgcccctgggcacgcgcaagcgcaagcgccctgcccgccccctctcatcggagtctgaggtcgaatccgagacagccttggagtctgaggtcgaatccgagacagcatcggattcgaccgagtctggggaccaggaggaagccccccgcatcggtggccgtagggccccccggaggcttggggggcggttttttctggacatgtcggcggaatccaccacggggacggaaacggatgcgtcggtgtcggacgaccccgacgacacgtccgactggtcttgtgacgacattcccccacgacccaagcgggcccgggtaaacctgcggctcactagctctcccgatcggcgggatggggttatttttcctaagatggggcgggtccggtctacccgggaaacgcagccccgggcccccaccccgtcggccccaagcccaaatgcaatgctccggcgctcggtgcgccaggcccagaggcggagcagcgcacgatggacccccgacctgggctacatgcgccagtgtatcaatcagctgtttcgggtcctgcgggtcgcccgggacccccacggcagtgccaaccgcctgcgccacctgatacgcgactgttacctgatgggatactgccgagcccgtctggccccgcgcacgtggtgccgcttgctgcaggtgtccggcggaacctggggcatgcacctgcgcaacaccatacgggaggtggaggctcgattcgacgccaccgcagaacccgtgtgcaagcttccttgtttggaggccagacggtacggcccggagtgtgatcttagtaatctcgagattcatctcagcgcgacaagcgatgatgaaatctccgatgccaccgatctggaggccgccggttcggaccacacgctcgcgtcccagtccgacacggaggatgccccctcccccgttacgctggaaaccccagaaccccgcgggtccctcgctgtgcgtctggaggatgagtttggggagtttgactggaccccccaggagggctcccagccctggctgtctgcggtcgtggccgataccagctccgtggaacgcccgggcccatccgattctggggcgggtcgcgcagcagaagaccgcaagtgtctggacggctgccggaaaatgcgcttctccaccgcctgcccctatccgtgcagcgacacgtttctccggccgtgagtccggtcgccccgacccccttgtatgtccccaaaataaaagaccaaaatcaaagcgtttgtcccagcgtcttaatggcgggaagggcggagagaaacagaccacgcgtacatggggggtgtttgggggtttattgacatcggggctacagggtggtaaccggatagcagatgtgaggaagtctgggccgttcgccgcgaacggcgatcagagggtccgtttcttgcggaccacggcccggtgatgtgggttgctcgtctaaaatctcgggcatacccatacacgcacaacacggacgccgcaccgaatgggacgtcgtaagggggtgggaggtagctgggtggggtttgtgcagagcaatcagggaccgcagccagcgcatacaatcgcgctcccgtccgttggtcccgggcaggaccacgccgtactggtattcgtaccggctgagcagggtctccagggggtggttgggtgccgcggggaacggggtccacgccacggtccactcgggcaaaaaccgagtcggcacggcccacggttctcccacccacgcgtctggggtcttgatggcgataaatcttaccccgagccggattttttgggcgtattcgagaaacggcacacacagatccgccgcgcctaccacccacaagtggtagaggcgaggggggctgggttggtctcggtgcaacagtcggaagcacgccacggcgtccacgacctcggtgctctccaaggggctgtcctccgcaaacaggcccgtggtggtgtttggggggcagcgacaggacctagtgcgcacgatcgggcgggtgggtttgggtaagtccatcagcggctcggccaaccgtcgaaggttggccgggcgaacgacgaccggggtacccaggggttctgatgccaaaatgcggcactgcctaagcaggaagctccacagggccgggcttgcgtcgacggaagtccggggcagggcgttgttctggtcaaggagggtcattacgttgacgacaacaacgcccatgttggtatattacaggcccgtgtccggtttggggcacttgcagatttgtaaggccacgcacggcggggagacaggccgacgcgggggctgctctaaaaatttaagggccctacggtccacagacccgccttcccgggggggcccttggagcgaccggcagcggaggcgtccgggggaggggagggttatttacgggggggtaggtcagggggtgggtcgtcaaactgccgctccttaaaaccccggggcccgtcgttcggggtgctcgttggttggcactcacggtgcggcgaatggcctgtcgtaagttttgtcgcgtttacgggggacagggcaggaggaaggaggaggccgtcccgccggagacaaagccgtcccgggtgtttcctcatggccccttttataccccagccgaggacgcgtgcctggactccccgcccccggagacccccaaaccttcccacaccacaccacccggcgatgccgagcgcctgtgtcatctgcaggagatcctggcccagatgtacggaaaccaggactaccccatagaggacgaccccagcgcggatgccgcggacgatgtcgacgaggacgccccggacgacgtggcctatccggaggaatacgcagaggagctttttctgcccggggacgcgaccggtccccttatcggggccaacgaccacatccctcccccgcgtggcgcatctccccccggtatacgacgacgcagccgggatgagattggggccacgggatttaccgcagaagagctggacgccatggacaggcaggcggctcgagccatcagccgcggcggcaagcccccctcgaccatggccaagctggtgactggcatgggctttacgatccacggagcgctcaccccaggatcggaggggtgtgtctttgacagcagccacccagattacccccaacgggtaatcgtgaaggcggggtggtacacgagcacgagccacgaggcgcgactgctgaggcgactggaccacccggcgatcctgcccctcctggacctgcatgtcgtctccggggtcacgtgtctggtcctccccaagtaccaggccgacctgtatacctatctgagtaggcgcctgaacccactgggacgcccgcagatcgcagcggtctcccggcagctcctaagcgccgttgactacattcaccgccagggcattatccaccgcgacattaagaccgaaaatatttttattaacacccccgaggacatttgcctgggggactttggtgccgcgtgcttcgtgcagggttcccgatcaagccccttcccctacggaatcgccggaaccatcgacaccaacgcccccgaggtcctggccggggatccgtataccacgaccgtcgacatttggagcgccggtctggtgatcttcgagactgccgtccacaacgcgtccttgttctcggccccccgcggccccaaaaggggcccgtgcgacagtcagatcacccgcatcatccgacaggcccaggtccacgttgacgagttttccccgcatccagaatcgcgcctcacctcgcgctaccgctcccgcgcggccgggaacaatcgcccgccttacacccgaccggcctggacccgctactacaagatggacatagacgtcgaatatctggtttgcaaagccctcaccttcgacggcgcgcttcgccccagcgccgcagagctgctttgtttgccgctgtttcaacagaaatgaccgcccccggggggcggtgctgtttgcgggttggcacaaaaagaccccgacccgcgtctgtggtgtttttggcatcatgtcgccgggcgccatgcgtgccgttgttcccattatcccattccttttggttcttgtcggtgtatcgggggttcccaccaacgtctcctccaccacccaaccccaactccagaccaccggtcgtccctcgcatgaagcccccaacatgacccagaccggcaccaccgactctcccaccgccatcagccttaccacgcccgaccacacaccccccatgccaagtatcggactggaggaggaggaggaagaggaggagggggccggggatggcgaacatcttaaggggggagatgggacccgtgacaccctaccccagtccccgggtccagccgtcccgttggccggggatgacgagaaggacaaacccaaccgtcccgtagtcccaccccccggtcccaacaactcccccgcgcgccccgagaccagtcgaccgaagacaccccccaccagtatcgggccgctggcaactcgacccacgacccaactcccctcaaaggggcgacccttggttccgacgcctcaacataccccgctgttctcgttcctcactgcctcccccgccctggacaccctcttcgtcgtcagcaccgtcatccacaccttatcgtttgtgtgtattgttgctatggcgacacacctgtgtggtggttggtccagacgcgggcgacgcacacaccctagcgtgcgttacgtgtgcctgccgcccgaacgcgggtagggtatggggcggggatggggagagcccacacgcggaaagcaagaacaataaaggcggcgggatctagttgatatgcgtctctgggtgtttttggggtgtggtgggcgcggggcggtcattggacgggggtgcagttaaatacatgcccgggacccatgaagcatgcgcgacttccgggcctcggaacccacccgaaacggccaacggacgtctgagccaggcctggctatccggagaaacagcacacgacttggcgttctgtgtgtcgcgatgtctctgcgcgcagtctggcatctggggcttttgggaagcctcgtgggggctgttcttgccgccacccatctgggacctgcggccaacacaacggaccccttaacgcacgccccagtgtcccctcaccccagccccctggggggctttgccgtccccctcgtagtcggtgggctgtgtgccgtagtcctgggggcggcgtgtctgcttgagctcctgcgtcgtacgtgccgcgggtgggggcgttaccatccctacatggacccagttgtcgtataattttttcccccccccccttctccgcatgggtgatgtcgggtccaaactcccgacaccaccagctggcatggtataaatcaccggtgcgccccccaaaccatgtccggcagggggatggggggcgaatgcggagggcacccaacaacaccgggctaaccaggaaatccgtggccccggcccccaacaaagatcgcggtagcccggccgtgtgacattatcgtccataccgaccacaccgacgaatcccctaagggggaggggccattttacgaggaggaggggtataacaaagtctgtctttaaaaagcaggggttagggagttgttcggtcataagcttcagtgcgaacgaccaactaccccgatcatcagttatccttaaggtctcttttgtgtggtgcgttccggtatggggggggctgccgccaggttgggggccgtgattttgtttgtcgtcatagtgggcctccatggggtccgcggcaaatatgccttggcggatgcctctctcaagatggccgaccccaatcgctttcgcggcaaagaccttccggtcctggaccagctgaccgaccctccgggggtccggcgcgtgtaccacatccaggcgggcctaccggacccgttccagccccccagcctcccgatcacggtttactacgccgtgttggagcgcgcctgccgcagcgtgctcctaaacgcaccgtcggaggccccccagattgtccgcggggcctccgaagacgtccggaaacaaccctacaacctgaccatcgcttggtttcggatgggaggcaactgtgctatccccatcacggtcatggagtacaccgaatgctcctacaacaagtctctgggggcctgtcccatccgaacgcagccccgctggaactactatgacagcttcagcgccgtcagcgaggataacctggggttcctgatgcacgcccccgcgtttgagaccgccggcacgtacctgcggctcgtgaagataaacgactggacggagattacacagtttatcctggagcaccgagccaagggctcctgtaagtacgccctcccgctgcgcatccccccgtcagcctgcctctccccccaggcctaccagcagggggtgacggtggacagcatcgggatgctgccccgcttcatccccgagaaccagcgcaccgtcgccgtatacagcttgaagatcgccgggtggcacgggcccaaggccccatacacgagcaccctgctgcccccggagctgtccgagacccccaacgccacgcagccagaactcgccccggaagaccccgaggattcggccctcttggaggaccccgtggggacggtggcgccgcaaatcccaccaaactggcacatcccgtcgatccaggacgccgcgacgccttaccatcccccggccaccccgaacaacatgggcctgatcgccggcgcggtgggcggcagtctcctggcagccctggtcatttgcggaattgtgtactggatgcaccgccgcactcggaaagccccaaagcgcatacgcctcccccacatccgggaagacgaccagccgtcctcgcaccagcccttgttttactagatacccccccttaatgggtgcgggggggtcaggtctgcggggttgggatgggaccttaactccatataaagcgagtctggaaggggggaaaggcggacagtcgataagtcggtagcgggggacgcgcacctgttccgcctgtcgcacccacagctttttcgcgaaccgtcccgtttcgggatgccgtgccgcccgttgcagggcctggtgctcgtgggcctctgggtctgtgccaccagcctggttgtccgtggccccacggtcagtctggtatcaaactcatttgtggacgccggggccttggggcccgacggcgtagtggaggaagacctgcttattctcggggagcttcgctttgtgggggaccaggtcccccacaccacctactacgatggggtcgtagagctgtggcactaccccatgggacacaaatgcccacgggtcgtgcatgtcgtcacggtgaccgcgtgcccacgtcgccccgccgtggcatttgccctgtgtcgcgcgaccgacagcactcacagccccgcatatcccaccctggagctgaatctggcccaacagccgcttttgcgggtccggagggcgacgcgtgactatgccggggtgtacgtgttacgcgtatgggtcggggacgcaccaaacgccagcctgtttgtcctggggatggccatagccgccgaaggtactctggcgtacaacggctcggcccatggctcctgcgacccgaaactgcttccgtcttcggccccgcgtctggccccggcgagcgtataccaacccgcccctaacccggcctccaccccctcgaccaccacctccaccccctcgaccaccatccccgctccccaagcatcgaccacacccttccccacgggagacccaaaaccccaacctcacggggtcaaccacgaacccccatcgaatgccacgcgagcgacccgcgactcgcgatatgcgctaacggtgacccagataatccagatagccatccccgcgtccattatagccctggtgtttctggggagctgtatttgctttatacacagatgtcaacgccgctaccgacgctcccgccgcccgatttacagcccccagatacccacgggcatctcatgcgcggtgaacgaagcggccatggcccgcctcggagccgagctcaaatcgcatccgagcaccccccccaaatcccggcgccggtcgtcacgcacgccaatgccctccctgacggccatcgccgaagagtcggagcccgcgggggcggctgggcttccgacgccccccgtggaccccacgacatccaccccaacgcctcccctgttggtataggtccacggccactggccgggggcaccacataaccgaccgcagtcactgagttgggaataaaccggtattatttacctatatccgtgtatgtccatttctttcttcccccccccccccggaaaccaaagaaggaagcaaagaatggatgggaggagttcaggaagccggggagagggcccgcggcgcatttaaggcgttgttgtgttgactttggctcttctggcgggttggtgcggtgctgtttgttgggctcccattttacccgaagatcggctgctatccccgggacatggatcgcggggcggtggtggggtttcttctcggtgtttgtgttgtatcgtgcttggcgggaacgcccaaaacgtcctggagacgggtgagtgtcggcgaggacgtttcgttgcttccagctccggggcctacggggcgcggcccgacccagaaactactatgggccgtggaacccctggatgggtgcggccccttacacccgtcgtgggtctcgctgatgccccccaagcaggtgcccgagacggtcgtggatgcggcgtgcatgcgcgctccggtcccgctggcgatggcgtacgcccccccggccccatctgcgaccgggggtctacgaacggacttcgtgtggcaggagcgcgcggccgtggttaaccggagtctggttattcacggggtccgagagacggacagcggcctgtataccctgtccgtgggcgacataaaggacccggctcgccaagtggcctcggtggtcctggtggtgcaaccggccccagttccgaccccacccccgaccccagccgattacgacgaggatgacaatgacgagggcgaggacgaaagtctcgccggcactcccgccagcgggaccccccggctcccgcctccccccgcccccccgaggtcttggcccagcgcccccgaagtctcacatgtgcgtggggtgaccgtgcgtatggagactccggaagctatcctgttttcccccggggagacgttcagcacgaacgtctccatccatgccatcgcccacgacgaccagacctactccatggacgtcgtctggttgaggttcgacgtgccgacctcgtgtgccgagatgcgaatatacgaatcgtgtctgtatcacccgcagctcccagaatgtctgtccccggccgacgcgccgtgcgccgcgagtacgtggacgtctcgcctggccgtccgcagctacgcggggtgttccagaacaaaccccccaccgcgctgttcggccgaggctcacatggagcccgtcccggggctggcgtggcaggcggcctccgtcaatctggagttccgggacgcgtccccacaacactccggcctgtatctgtgtgtggtgtacgtcaacgaccatattcacgcctggggccacattaccatcagcaccgcggcgcagtaccggaacgcggtggtggaacagcccctcccacagcgcggcgcggatttggccgagcccacccacccgcacgtcggggcccctccccacgcgcccccaacccacggcgccctgcggttaggggcggtgatgggggccgccctgctgctgtctgcgctggggttgtcggtgtgggcgtgtatgacctgttggcgcaggcgtgcctggcgggcggttaaaagcagggcctcgggtaaggggcccacgtacattcgcgtggccgacagcgagctgtacgcggactggagctcggacagcgagggagaacgcgaccaggtcccgtggctggcccccccggagagacccgactctccctccaccaatggatccggctttgagatcttatcaccaacggctccgtctgtatacccccgtagcgacgggcatcaatctcgccgccagctcacaacctttggatccggaaggcccgatcgccgttactcccaggcctccgattcgtccgtcttctggtaaggcgccccatcccgaggccccacgtcggtcgccgaactgggcgaccgccggcgaggtggacgtcggagacgagctaatcgcgatttccgacgaacgcggacccccccgacatgaccgcccgcccctcgccacgtcgaccgcgccctcgccacacccgcgacccccgggctacacggccgttgtctccccgatggccctccaggctgtcgacgccccctccctgtttgtcgcctggctggccgctcggtggctccggggggcttccggcctgggggccgtcctgtgtgggattgcgtggtatgtgacgtcaattgcccgaggcgcacaaagggccggtggtccgcctagccgcagcaaattaaaaatcgtgagtcacagcgaccgcaacttcccacccggagctttcttccggcctcgatgacgtcccggctctccgatcccaactcctcagcgcgatccgacatgtccgtgccgctttatcccacggcctcgccagtttcggtcgaagcctactactcggaaagcgaagacgaggcggccaacgacttcctcgtacgcatgggccgccaacagtcggtattaaggcgttgacgcagacgcacccgctgcgtcggcatggtgatcgcctgtctcctcgtggccgttctgtcgggcggatttggggcgctcctgatgtggctgctccgctaaaagaccgcatcgacacgcgcgtccttcttgtcgtctctcttcccccccatcaccccgcaatttgcacccagcctttaactacattaaattgggttcgattggcaatgttgtctcccggttgatttttgggtgggtggggagtgggtgggtggggagtgggtgggtggggagtgggtgggtggggagtgggtgggtggggagtgggtgggtggggagtgggtgggtggggagtgggtgggtggggagtgggtgggtggggagtgggtgggtggggagtggcaaggaagaaacaagcccgaccaccagacagaaaatgtaaccatacccaaaccgactctgggggctgtttgtggggtcggaaccataggatgaacaaaccaccccgtacctcccgcacccaagggtgcgggtggctcatcggcatctgtccggtatgggttgttccccacccactcgcgttcggacgtcttagaatcatggcggttttctatgccgacatcggttttctcccccgcaataagacacgatgcgataaaatctgtttgtaaaatttattaagggtacaaattgccctagcacaggggtggggttagggccgggtccccacacccaaacgcaccaaacagatgcaggcagtgggtcgagtacagccccgcgtacgaacacgtcgatgcgtgtgtcagacagcaccagaaagcacaggccatcaacaggtcgtgcatgtgtcggtgggtttggacgcggggggccatggtggtgataaagttaatggccgccgtccgccagggccacaggggcgacgtctcttggttggcccggagccactgggtgtggaccagccgcgcgtggcggcccaacatggcccctgtagccgggggcgggggatcgcgcacgtttgcagcgcacatgcgagacacctcgaccacggttcgaaagaaggcccggtggtccgcgggcaacatcaccaggtgcgcaagcgcccgggcgtccagagggtagagccctgagtcatccgaggttggctcatcgcccgggtcttgccgcaagtgcgtgtgggttgggcttccggtgggcgggacgcgaaccgcggtgtggatcccgacgcgggcccgagcgtatgctccatcttgtggggagaaggggtctgggctcgccaggggggcatacttgcccgggctatacagacccgcgagccgtacgtggttcgcggggggtgcgtggggtccggggctccctgggagaccggggttgtcgtggatccctggggtcacgcggtaccctggggtctctgggagctcgcggtactctgggttccctaggttctcggggtggtcgcggaacccggggctcccggggaacacgcggtgtcctggggattgttggcggtcggacggcttcagatggcttcgagatcgtagtgtccgcaccgactcgtagtagacccgaatctccacattgccccgccgcttgatcattatcaccccgttgcgggggtccggagatcatgcgcgggtgtcctcgaggtgcgtgaacacctctggggtgcatgccggcggacggcacgccttttaagtaaacatctgggtcgcccggcccaactggggccgggggttgggtctggctcatctcgagagacacgggggggaaccaccctccgcccagagactcgggtgatggtcgtacccgggactcaacgggttaccggattacggggactgtcggtcacggtcccgccggttcttcgatgtgccacacccaaggatgcgttgggggcgatttcgggcagcagcccgggagagcgcagcaggggacgctccgggtcgtgcacggcggttctggccgcctcccggtcctcacgcccccttttattgatctcatcgcgtacgtcggcgtacgtcctgggcccaacccgcatgttgtccaggaaggtgtccgccatttccagggcccacgacatctacttgtcgtcatcgtctttgtagtcgaccgagttcgccgggccggctccgcgggccagggcccgggcacgggcctcgggccccaggcacggcccgatgaccgcctcggcctccgccacccggcgccggaaccgagcccggtcggcccgctcgcgggcccacgagccgcggcgcgccaggcgggcggccgaggcccagaccaccaggtggcgcacccggacgtggggcgagaagcgcacccgcgtgggggtcgcgggggtcgcgggggtcgcggggggcttcggcgccccctccccgcccgcgcgtcgcaggcgcaggcgcgccaggtgctctgcggtgacgcgcaggcggagggcgaggcgcggcggaaggcggaaggggcgtgagggggggtgggaggggttagccccgccccccgggcccgcgccgggcggtggggaccgggggcggggggcggcggcggtgggccgggcctctggcgccggctcgggcggggggctgtccggccagtcgtcgtcgtcgtcgtcggacgcggactcgggaacgtggagccactggcgcagcagcagcgaacaagaaggcgggggcccactggcggggggcggcggcggggcggccgcgggcgcgctcctgaccacgggttccgagttgggcgtggaggttacctgggactgtgcggttgggaccgcgcccgtgggcccgggcggccgggggcggcgggggccgcgatggcggcggcgggccat

SEQ ID NO: 7 - DNA, 18848 bp, synthetic construct
  source 1..18848: mol_type = other DNA
cgcctgggggatctggttgttcggagccacgccaggcttctccgtgaggtgcacccggaccatcggtccaaccagcgccaggacgtggcccgccaggatttctgttagtccgaggtgctctccttcgtggatcgctcaggccgtctgctgcgccaggtccgcccctgcctcggcctcgcctgcgtcctcgcctaccgcctctagctggttgcgccttagttggcggtggctgcagcctagctacttttccgccatgtcgttctggactacatgatggtcttctagctcccaaccgggaccatacagaatgtggggcgggctgtgggtcattcggcccttgacgttcagtaggcctcggggtttgcgtacttggcactcctggatcctcaggtcgactgggccgcacagctggccgtgccgcatccaggatgggttcaggaccatcttcaccatgtggatcttccatatcttcatcactggatgagcattcgccattggaatctgactcgagatcatctcgacgactttcggctggttccggtggatcttcatcgaggtcggaatcactcagatcgagtccaagatctatcagcatgtctatatctgtggccataccggtacgcgttgggccaggattctcctcgacgtcaccgcatgttagcagacttcctctgccctctccactgcctaatactccatcgccttcaaatgccccaccatcatcctcatcccatgctccttcccaatctacgacctctctccttgggggtgtcgccagacctgcttcagcgccgaggacttcaaccgctcctgcagcggccaaaaccgtcccggatcgacctgtagcggatgcccacctgatgcccggtggtgctggtgggagtgcgccgggtccatcatcatcacctcttaatacaaggggtggagcatcatcatcaggttccaataaagctcgtgcacagaaatcgcgacggggaccccgccagcgcgcaggtcctgcccgaacggcttcccgaccgagggcaacataaacagggcgtaagggagccccgagaccccaccgggcacaagcagcatggctatgagcttcttcttcacaaaagtcgggggccccaggggccatagcatccgttgtgcctgatgcggcagcgcgtccatccaatgcggggagaaccgcgcgccgatattctcttggagacattggaactggggtatctggtccaaaccgagtcctaactctataccttacattcccgcccctacagagcctcaatgggggtgcatccggatacaatcgagcatgagcagcttcgacacgagcaaacacgcctggtccaaagactcttccgctagctaaaacagtccgccggagatcacgggcggcaggccaccttactgcacattgaacagcaggtaagagttcacaagcgagatatgcatgttgcctagagacggcaggaccatcagccggccaatcacatgcccgaactgtattcactacaataagcctgcgatctcctgcggatgccaagagaccgaggaactcgacagcaccagcaaaagccaaatctcttgtactgaggagaaggactccttgcgctcccaatgcactaacatctggtgccccagtccagtttccggcccaagcagctgtatctggtccacagaggcgattagctaatgcagcaaggagacaagaaagaccgccccgttctgcagaccattcgggcggtccgccgctagcgcccccccctgcaagatcttcaccgggtaagggtgaatacaagacaactacccgaacatcttcaggatctggaatttgtctcatccatgcagccatccttctaaggggtccgctagctctgagtggaccgaacaatcgcccgccagctgcaccatgcggatgtggattgtcatcatcatccccgccaccacaagctgcttgcgcagctggtgctgggcccgcacacctagcagcaatgctcgcgagtgcgcgtggatcaaacatcagcgcgggacgccatggcaccgggaaaagaggatgatctgtcaattcagcgactgctcggggagaacaatatgcttcgagtgctgcagctgcaggtgcggctgtatgtgaaggtccgggcggttgtcgtctccatccgccgagaggatctggcccttctgctggtctcctagatactgcaacaggtctaggtcttgcttgggcagcagcagccctaggtgcggcaggttgtgcaggagccggttcaggtcctggtggggtagatggtggagccggggctggaagaggtgccctagcatcgcttccaggagcatctgccccggatttctttgtctttggtgggcgtggcccccccccgccagggggtctagcaggtccaggggatttccttttccttccttcgcgaggagcagctgatgctgcagcagctgcgagagcatccgccgcatcaggcgcggaagctgctgcggccaacaaaggcctgagtgattgattatcgaaaaggagatcggctgcagccgcagctgcagaggatggtaatcgaggatctctgggaagggctggtccgagagcacctgcaaccaatgatacagcccttacagctgcgacagctgcttcagaaccacctgcaactctgagatcacccctcaatctcatcaaaaccaaagcatccctaacaaatcttaattcccgcaaccaggccctgagtcgtggggcatcagcatgtggtgggggtggagaggctggcccggccgggccttcaggcctaggcggtgaagctggtcttgcgcctgccaagccgggcacagcggccaaatcaccatcaaacccttcagcgagggcttcgagtatacctcgacacgcagctaaacattcaacagcaacacgcccagcttgagcccttcttccagcatcatcatcagcatcagcatgtctcgctgcatcaggatcatcaccaccagctggagacgcaggtgcagcgctaagtcggccgagagcagccaaaatgcctgcagctccatagcccgctggtactgctcgttccccgggcgcagcagcagccactgctgccacgccttcatcatcggcacctgctcccggagagcctgctgcgccggttaaggcagcattttctcttgcaaggagtggtgcatatgcccgcctgagtgaagtgagcaagaaacctttctgagctctatcataccgtcgagacatagcgactgcagcggctgcatgggctaaaccccacccaaaacgtcctgctgccattgcatacccaagatgaggtactgctcgagctacggatcctgtaataaaagaggatgaatttctggcagcaccacttatgcgaaaacatgcttgatcgagggcgacatctcctggcactaccctgggattttgaagccatcccatagcttcggcatctggcgtatagaggagtcgtgttatcaacgcatattgttgggccgcatctccgagttctggtgcccataccgctgctggtgctccggatgcttcaaaacgacgtcttgcttcttctgcttccggtgcaccccacagacctggacgggaatccccgagtccaccataaaggactctgccgggaggaggtgggccagcacctggccatggttcgccagaaacatatccatcccggtatctagcataaaacgccccagaagtggcatccgcatcaagttccactcttctcggttggccagctgtaaaccttcctgtcgcatctcttccagcgacagcggcccgtgctctccgccgttcaattcgtccggctgacgcggcaggcgtccgtgcagcggctctaggtttaggggctgcttctgacagaggtgggggaccagggggtggcggggtccttcctggagcagctggggcggctgaggaagggcccctgcccactgcacgagcttctcgggcatgatcagcggcatcattaccatcatcatcttcatcttcatcgctggaagaagaacttgaactggctgaggaactactgcttgagccagaatcagaacttgtggaactggctgaagggcgccatcgcccatgccgtcgccgtctagggggttgagcagggggcctggggctgagcctatcggttggatcggggtatgcccctctcaggggagcttctctctcccgcccgcgcgcgggcgctcgatctcccgcagcatctgccgcatcatcatattcatcaccatcgtcatcatcagccctgaatgctggtgttcgtggtggggatgcagctggatccggggtgggaatggtacgcactgcttcttcgaccatagatgccaacaaggcaagttgccggggagaaaccgcatctccagcatcttctcccgcatctgtaccggcagccggagcacggccatcgcgacgtgcatcatctaaatcatgcggatgatctggatcatgatccggatcatctccgccttcttcggtttcagcaccccagccaagcgcaccacgttcatctctatcgggagatggtgttggtggtgggccatctgtaggacccggtgaacctggccgttgtttattttcactagccatacgcgtgaattcagggccggggttctcctcgacgtcgcctgcctgcttcagcaggctaaagttggtggcgcctgagccctgcttgccttcatctcgagtgctggcaccttgttcaccagaccaaggatggcgggagcgaagggacctaaaatccaacgccccaactaacgtcccttgatcaaagagcatatttccaacaggcgtcatccacagactattccattcgcttgcaggcgctgtgggatattcaggtggggtaacatgatttccggcagtttcaggcaacaatgttcgacgagaccatcctggcactgcagccctgaggcgtgtagccatattaccagtttgatctacaagcacgacatatgcgccaatattgccagtttccatatcgagaataggcaaacaatctccagtaattgttttatttacatatggggacaatgccacaactgaggatacgccgctaataggtaaatatctagtcagtccaccagctggcacagcgccactcgtttctgcatgtctagttttgcgagcgcatttgcgaggaccgcgtggaccgcttgcggcacgaggtcccagagaagtctcttcctgcctgccgcccaacgcccctacagcgccaccgctagatgcgctggcagatgagcttgctgcgcccgtagcagaggatgttgcaccggctggtgtgggtgctgaagagcttgacgcagatgaagagcttgctgatgcggcggagctggtgagaggtgttcctgggccgccttgaccccgaccgccagggccgctatcagatggcggatgggtggctgctcgtttagctccagcgggggccagcggtgggcgtgtgctttgtgggctcggattctcttgaccggagccccggcgttttcgaggcctaacggcggcttcttgttctacactcgctgcagatggcagaggtggagctccagacggagctgccccgctcggcgccgcgccccgagatgggccatgaccgccttctactccggggccaccgctcccacgggctacggtagcgcgggcacgacaaaggctttgctcctgattggcagcttgggccaagctggaatgggattgtgggactctacgggcatcggctggccttgctgctggttcagctcctggagctggtgctcttggccctgggccaggtgggggagcacggacgcagggagctactgctgctcgtggccgagctggtccgcttgctgctgcgcttgcaggcggcccaggtctaggtgcagatcccggcattggggctgctggcggtcgatgcggactagcaggcggagaatctgaaattacgataggatcgcgattattggcgagtggtgccggccgattcaccagtggccctgtacgccctcttggtcttccagcttctgcctcgaccacacccacgccgccgcttggcccgctggcacctctagggacggctgcacgtgattgtcgagatccgcctcctccagaggaatttgttgttgtatttgtatttgatgacccatgggggccaataggtgcacttggcggggccgttcgtgcggctgctggttgaggtgcagcatgactagcgccaccagtgacaggtggagcagctgctccccgtcttgggggagctcttggtgttctcctaggtgctgggggcacataatccgcatcatccaaatcatcatcgtcttcatcggttgtcggttctggatgagttggggacaatgctcttacggtatgaccgcccaatgtcaaatatcttggagcaaacctttggttaccagtccatatgaaatcgacagcagttcctgcccgcacagcttcttctgcttccattcttgtttgaggatcatttactataggaatagttgaaaagctaccagatggtgtaaccccgacaatgagataaacaagtttagcattacagagaggacaagtatttcgaagctgcatccatgtcttcatacaaggaatacaaaaccgatgcatacaaggaaaagtatcacatctgagatgcggggcaatttcgtcggtacagacagcacaaacatcaccttcatctgaaccgccatcttcgcgcggtggagccccgccacagctcccaggatcctcttctctaggcggggaaccaccggacactgctccgccgtcgacaccttgaggtcccaataaacctgtttcaaagagctcagtatcggtagaatcggcttcagaagcagaatcatcatcgtgatgatcagcatcaccgcgtccaccgacctctgtttcagcttcgctatcacttgaatctgggagatcgcgatcacaagggaatacccacacgtctggagcaggttcccgttgtggtcttccttcggggcgtctagtggaagctccaggccttggttccatgaattcgcctggctctagtagcgatctacactagcactatcagtaggatgataccggtagcaagcttgtatacgcggccgctccaggcgatctgacggttcactaaacgagctctgcttatataggcctcccaccgtacacgcctacctcgacatacgttctctatcactgatagggagtaaactcgacatacgttctctatcactgatagggataaactcgacatacgttctctatcactgatagggagtaaactcgacatacgttctctatcactgatagggagtaaactcgacatacgttctctatcactgatagggagtaaactcgacatcgttctctatcactgatagggagtaaactcgacatacgttctctatcactgatagggagtaaactcgagtggtatcaagagtacgatcgttcctgttaacaactagtggcgcgccgtttaaaccgagtttactccctatcagtgatagagaacgtatgtcgagtttactccctatcagtgatagagaacgatgtcgagtttactccctatcagtgatagagaacgtatgtcgagtttactccctatcagtgatagagaacgtatgtcgagtttactccctatcagtgatagagaacgtatgtcgagtttatccctatcagtgatagagaacgtatgtcgagtttactccctatcagtgatagagaacgtatgtcgaggtaggcgtgtacggtgggaggcctatataagcagagctcgtttagtgaaccgtcagatcgcctggagcggccgcgtatacaagcttgctaccggtatcatcctactgatagtgctagtgtagatcgctactagagccaggcgaattcgtcagtgggcctcgatatcaccatggacctcttggtcgacgagctgtttgccgacatgaacgcggacggcgcttcgccaccgcccccccgcccggccgggggtcccaaaaacaccccggcggcccccccgctgtacgcaacggggcgcctgagccaggcccagctcatgccctccccacccatgcccgtcccccccgccgccctctttaaccgtctcctcgacgacttgggctttagcgcgggccccgcgctatgtaccatgctcgatacctggaacgaggatctgttttcggcgctaccgaccaacgccgacctgtaccgggagtgtaaattcctatcaacgctgcccagcgatgtggtggaatggggggacgcgtacgtccccgaacgcacccaaatcgacattcgcgcccacggcgacgtggccttccctacgcttccggccacccgcgacggcctcgggctctactacgaagcgctctctcgtttcttccacgccgagctacgggcgcgggaggagagctatcgaaccgtgttggccaacttctgctcggccctgtaccggtacctgcgcgccagcgtccggcagctgcaccgccaggcgcacatgcgcggacgcgatcgcgacctgggagaaatgctgcgcgccacgatcgcggacaggtactaccgagagaccgctcgtctggcgcgtgttttgtttttgcatttgtatctatttttgacccgcgagatcctatgggccgcgtacgccgagcagatgatgcggcccgacctgtttgactgcctctgttgcgacctggagagctggcgtcagttggcgggtctgttccagcccttcatgttcgtcaacggagcgctcaccgtccggggagtgccaatcgaggcccgccggctgcgggagctaaaccacattcgcgagcaccttaacctcccgctggtgcgcagcgcggctacggaggagccaggggcgccgttgacgacccctcccaccctgcatggcaaccaggcccgcgcctctgggtactttatggtgttgattcgggcgaagttggactcgtattccagcttcacgacctcgccctccgaggcggtcatgcgggaacacgcgtacagccgcgcgcgtacgaaaaacaattacgggtctaccatcgagggcctgctcgatctcccggacgacgacgcccccgaagaggcggggctggcggctccgcgcctgtcctttctccccgcgggacacacgcgcagactgtcgacggcccccccgaccgatgtcagcctgggggacgagctccacttagacggcgaggacgtggcgatggcgcatgccgacgcgctagacgatttcgatctggacatgttgggggacggggattccccgggtccgggatttaccccccacgactccgccccctacggcgctctggatatggccgacttcgagtttgagcagatgtttaccgatgcccttggaattgacgagtacggtgggtaattctagagtcggggcggccggccgcttcgagcagacatgataagatacattgatgagtttggacaaaccacaactagaatgcagtgaaaaaaatgctttatttgtgaaatttgtgatgctattgctttatttgtaaccattataagctgcaataaacaagttaacaacaacaattgcattcattttatgtttcaggttcagggggaggtgtgggaggttttttaaagcaagtaaaacctctacaaatgtggtaaaatcgataagtgaggtgcactctcagtacaatctgctctgatgccgcatagttaagccagtatacactccgctatcgctacgtgactgggtcatggctgcgccccgacacccgccaacacccgctgacgcgccctgacgggcttgtctgctcccggcatccgcttacagacaagctgtgaccgtctccgggagctgcatgtgtcagaggttttcaccgtcatcaccgaaacgcgcgaggcagctgtggaatgtgtgtcagttagggtgtggaaagtccccaggctccccagcaggcagaagtatgcaaagcatgcatctcaattagtcagcaaccaggtgtggaaagtccccaggctccccagcaggcagaagtatgcaaagcatgcatctcaattagtcagcaaccatagtcccgcccctaactccgcccatcccgcccctaactccgcccagttccgcccattctccgccccatggctgactaattttttttatttatgcagaggccgaggccgcctcggcctctgagctattccagaagtagtgaggaggcttttttggaggcctaggcttttgcaaaaagctagcttcacgctgccgcaagcactcagggcgcaagggctgctaaaggaagcggaacacgtagaaagccagtccgcagaaacggtgctgaccccggatgaatgtcagctactgggctatctggacaagggaaaacgcaagcgcaaagagaaagcaggtagcttgcagtgggcttacatggcgatagctagactgggcggttttatggacagcaagcgaaccggaattgccagctggggcgccctctggtaaggttgggaagccctgcaaagtaaactggatggctttcttgccgccaaggatctgatggcgcaggggatcaagatctgatcaagagacaggatgaggatcgtttcgcatgattgaacaagatggattgcacgcaggttctccggccgcttgggtggagaggctattcggctatgactgggcacaacagacaatcggctgctctgatgccgccgtgttccggctgtcagcgcaggggcgcccggttctttttgtcaagaccgacctgtccggtgccctgaatgaactgcaggacgaggcagcgcggctatcgtggctggccacgacgggcgttccttgcgcagctgtgctcgacgttgtcactgaagcgggaagggactggctgctattgggcgaagtgccggggcaggatctcctgtcatctcaccttgctcctgccgagaaagtatccatcatggctgatgcaatgcggcggctgcatacgcttgatccggctacctgcccattcgaccaccaagcgaaacatcgcatcgagcgagcacgtactcggatggaagccggtcttgtcgatcaggatgatctggacgaagagcatcaggggctcgcgccagccgaactgttcgccaggctcaaggcgcgcatgcccgacggcgaggatctcgtcgtgacccatggcgatgcctgcttgccgaatatcatggtggaaaatggccgcttttctggattcatcgactgtggccggctgggtgtggcggaccgctatcaggacatagcgttggctacccgtgatattgctgaagagcttggcggcgaatgggctgaccgcttcctcgtgctttacggtatcgccgctcccgattcgcagcgcatcgccttctatcgccttcttgacgagttcttctgagcgggactctggggttcgaaatgaccgaccaagcgacgcccaacctgccatcacgagatttcgattccaccgccgccttctatgaaaggttgggcttcggaatcgttttccgggacgccggctggatgatcctccagcgcggggatctcatgctggagttcttcgcccaccccgggctcgatcccctcgcgagttggttcagctgctgcctgaggctggacgacctcgcggagttctaccggcagtgcaaatccgtcggcatccaggaaaccagcagcggctatccgcgcatccatgcccccgaactgcaggagtggggaggcacgatggccgctttggtccggatctttgtgaaggaaccttacttctgtggtgtgacataattggacaaactacctacagagatttaaagctctaaggtaaatataaaatttttaagtgtataatgtgttaaactactgattctaattgtttgtgtattttagattccaacctatggaactgatgaatgggagcagtggtggaatgcctttaatgaggaaaacctgttttgctcagaagaaatgccatctagtgatgatgaggctactgctgactctcaacattctactcctccaaaaaagaagagaaaggtagaagaccccaaggactttccttcagaattgctaagttttttgagtcatgctgtgtttagtaatagaactcttgcttgctttgctatttacaccacaaaggaaaaagctgcactgctatacaagaaaattatggaaaaatattctgtaacctttataagtaggcataacagttataatcataacatactgttttttcttactccacacaggcatagagtgtctgctattaataactatgctcaaaaattgtgtacctttagctttttaatttgtaaaggggttaataaggaatatttgatgtatagtgccttgactagagatcataatcagccataccacatttgtagaggttttacttgctttaaaaaacctcccacacctccccctgaacctgaaacataaaatgaatgcaattgttgttgttaacttgtttattgcagcttataatggttacaaataaagcaatagcatcacaaatttcacaaataaagcatttttttcactgcattctagttgtggtttgtccaaactcatcaatgtatcttatcatgtctggatccctcgaggcgcgaggggagggtcagtgaaatcggctctggcgcgggcgtcctcccaccctccccttccttcgggggagtcggtttacccgccgcctgcttgtcttcgacacctgattggctgtcgaagctgtgggaccgggcccttgctactggctcgagtctcacatgagcgaaaccactgccgcttagcgactctcgcgttgcccactgagcggccgccatgctcggtggtatgaaggagggggggcggtgtttcttagagaccgccgggggctagctccctttagtgagggttaattgcgcgcttggcgtaatcatggtcatagctgtttcctgtgtgaaattgttatccgctcacaattccacacaacataggagccggaagcataaagtgtaaagcctggggtgcctaatgagtgaggtaactcacattaattgcgttgcgctcactgcccgctttccagtcgggaaacctgtcgtgccagctgcattaatgaatcggccaacgcgcggggagaggcggtttgcgtattgggcgctcttccgcttcctcgctcactgactcgctgcgctcggtcgttcggctgcggcgagcggtatcagctcactcaaaggcggtaatacggttatccacagaatcaggggataacgcaggaaagaacatgtgagcaaaaggccagcaaaaggccaggaaccgtaaaaaggccgcgttgctggcgtttttccataggctccgcccccctgacgagcatcacaaaaatcgacgctcaagtcagaggtggcgaaacccgacaggactataaagataccaggcgtttccccctggaagctccctcgtgcgctctcctgttccgaccctgccgcttaccggatacctgtccgcctttctcccttcgggaagcgtggcgctttctcatagctcacgctgtaggtatctcagttcggtgtaggtcgttcgctccaagctgggctgtgtgcacgaaccccccgttcagcccgaccgctgcgccttatccggtaactatcgtcttgagtccaacccggtaagacacgacttatcgccactggcagcagccactggtaacaggattagcagagcgaggtatgtaggcggtgctacagagttcttgaagtggtggcctaactacggctacactagaaggacagtatttggtatctgcgctctgctgaagccagttaccttcggaaaaagagttggtagctcttgatccggcaaacaaaccaccgctggtagcggtggtttttttgtttgcaagcagcagattacgcgcagaaaaaaaggatctcaagaagatcctttgatcttttctacggggtctgacgctcagtggaacgaaaactcacgttaagggattttggtcatgagattatcaaaaaggatcttcacctagatccttttaaattaaaaatgaagttttaaatcaatctaaagtatatatgagtaaacttggtctgacagttaccaatgcttaatcagtgaggcacctatctcagcgatctgtctatttcgttcatccatagttgcctgactccccgtcgtgtagataactacgatacgggagggcttaccatctggccccagtgctgcaatgataccgcgagatccacgctcaccggctccagatttatcagcaataaaccagccagccggaagggccgagcgcagaagtggtcctgcaactttatccgcctccatccagtctattaattgttgccgggaagctagagtaagtagttcgccagttaatagtttgcgcaacgttgttgccattgctacaggcatcgtggtgtcacgctcgtcgtttggtatggcttcattcagctccggttcccaacgatcaaggcgagttacatgatcccccatgttgtgcaaaaaagcggttagctccttcggtcctccgatcgttgtcagaagtaagttggccgcagtgttatcactcatggttatggcagcactgcataattctcttactgtcatgccatccgtaagatgcttttctgtgactggtgagtactcaaccaagtcattctgagaatagtgtatgcggcgaccgagttgctcttgcccggcgtcaatacgggataataccgcgccacatagcagaactttaaaagtgctcatcattggaaaacgttcttcggggcgaaaactctcaaggatcttaccgctgttgagatccagttcgatgtaacccactcgtgcacccaactgatcttcagcatcttttactttcaccagcgtttctgggtgagcaaaaacaggaaggcaaaatgccgcaaaaaagggaataagggcgacacggaaatgttgaatactcatactcttcctttttcaatattattgaagcatttatcagggttattgtctcatgagcggatacatatttgaatgtatttagaaaaataaacaaataggggttccgcgcacatttccccgaaaagtgccacctgggtccttttcatcacgtgctataaaaataattataatttaaattttttaatataaatatataaattaaaaatagaaagtaaaaaaagaaattaaagaaaaaatagtttttgttttccgaagatgtaaaagactctagggggatcgccaacaaatactaccttttatcttgctcttcctgctctcaggtattaatgccgaattgtttcatcttgtctgtgtagaagaccacacacgaaaatcctgtgattttacattttacttatcgttaatcgaatgtatatctatttaatctgcttttcttgtctaataaatatatatgtaaagtacgctttttgttgaaattttttaaacctttgtttatttttttttcttcattccgtaactcttctaccttctttatttactttctaaaatccaaatacaaaacataaaaataaataaacacagagtaaattcccaaattattccatcattaaaagatacgaggcgcgtgtaagttacaggcaagcgatccgtcctaagaaaccattattatcatgacattaacctataaaaataggcgtatcacgaggccctttgtcacagcttgtctgtaagcggatgccgggagcagacaagcccgtcagggcgcgtcagcgggtgttggcgggtgtcggggctggcttaactatgcggcatcagagcagattgtactgagagtgcaccataccacagcttttcaattcaattcatcattttttttttattcttttttttgatttcggtttctttgaaatttttttgattcggtaatctccgaacagaaggaagaacgaaggaaggagcacagacttagattggtatatatacgcatatgtagtgttgaagaaacatgaaattgcccagtattcttaacccaactgcacagaacaaaaacctgcaggaaacgaagataaatcatgtcgaaagctacatataaggaacgtgctgctactcatcctagtcctgttgctgccaagctatttaatatcatgcacgaaaagcaaacaaacttgtgtgcttcattggatgttcgtaccaccaaggaattactggagttagttgaagcattaggtcccaaaatttgtttactaaaaacacatgtggatatcttgactgatttttccatggagggcacagttaagccgctaaaggcattatccgccaagtacaattttttactcttcgaagacagaaaatttgctgacattggtaatacagtcaaattgcagtactctgcgggtgtatacagaatagcagaatgggcagacattacgaatgcacacggtgtggtgggcccaggtattgttagcggtttgaagcaggcggcagaagaagtaacaaaggaacctagaggccttttgatgttagcagaattgtcatgcaagggctccctatctactggagaatatactaagggtactgttgacattgcgaagagcgacaaagattttgttatcggctttattgctcaaagagacatgggtggaagagatgaaggttacgattggttgattatgacacccggtgtgggtttagatgacaagggagatgcattgggtcaacagtatagaaccgtggatgatgtggtgtctacaggatctgacattattattgttggaagaggactatttgcaaagggaagggatgctaaggtagagggtgaacgttacagaaaagcaggctgggaagcatatttgagaagatgcggccagcaaaactaaaaaactgtattataagtaaatgcatgtatactaaactcacaaattagagcttcaatttaattatatcagttattaccctatgcggtgtgaaataccgcacagatgcgtaaggagaaaataccgcatcaggaaattgtaaacgttaatattttgttaaaattcgcgttaaatttttgttaaatcagctcattttttaaccaataggccgaaatcggcaaaatcccttataaatcaaaagaatagaccgagatagggttgagtgttgttccagtttggaacaagagtccactattaaagaacgtggactccaacgtcaaagggcgaaaaaccgtctatcagggcgatggcccactacgtgaaccatcaccctaatcaagttttttggggtcgaggtgccgtaaagcactaaatcggaaccctaaagggagcccccgatttagagcttgacggggaaagccggcgaacgtggcgagaaaggaagggaagaaagcgaaaggagcgggcgctagggcgctggcaagtgtagcggtcacgctgcgcgtaaccaccacacccgccgcgcttaatgcgccgctacagggcgcgtcgcgccattcgccattcaggctgcgcaactgttgggaagggcgatcggtgcgggcctcttcgctattacgccagctggcgaaagggggatgtgctgcaaggcgattaagttgggtaacgccagggttttcccagtcacgacgttgtaaaacgacggccagtgagcgcgcgtaatacgactcactatagggcgaattgggtaccgcaacgcgagagtcgctaagcgggtgggaagtcgggaacataatgtttgttacgttgggagggaaaggggtggctggatgcaggcgggagggaggcccgccctgcggcaaccggagggggagggagaagggagcggaaaatgggtaccccagacatgataagatacattgatgagtttggacaaaccacaactagaatgcagtgaaaaaaatgctttatttgtgaaatttgtgatgctattgctttatttgtaaccattataagctgcaataaacaagttaacaacaacaattgcattcattttatgtttcaggttcagggggaggtgtgggaggttttttaaagcaagtaaaacctctacaaatgtggtatggctgattatgatcttaaccggtgaagagtgaattacagtagaagtacttcccatgtacatacgggggagccacaatatgagatgctgtcagttcacacactctggaagagcattcttgccgatgagtatccagaatctctatcaatccggccatacacgcacccggaagataaaagtgcattttctcccctactcccaccccgagtgtggcataatcaatttcggccaccccgcgttctaccctattagcaagccgtgcaagtatcacgaagacaaagctggcgatatctttgatatcggccaatcttcttcttgagcagagctcatcgagaccacagagccctctggctttgagataacattgcaagaaaggtctcaacctagtagccagattgtccaaaactgcagctgctgtgccaattattggatcttgcggacgaagaggaagattatgatgaatacacattttacaccaagctaaggtttcatctgcgctagcaagtgcttctataaagttctcctgtctgagtacacaatctctcatagctttagcagttgaagcagcgcgcgggtttcctgcgaaggtccggtacagggatggcccatgtgctacaagtgtctcccaagatacacgccgagtttcagcatcgaaagggccgccctgaccagccaagactggtgcccatggactgttagcagctgggaatggttgtccgccgaatggatcatgcatcacttgggcagatctcccaaaagattcggatattcgatccactgcagcccgttcagaaatagacctcaacaccagtcgggttgtcgcatcaattgtatccgctgcaggggctttccgttcaggagcaggtgctcgaggatcggctgggggcggtgctattgccaaggtcatgagcgggggtggagcctgcctaacggatctagttcgtggac

SEQ ID NO: 8 - DNA, 16671 bp, synthetic construct
  source 1..16671: mol_type = other DNA
cactcaaccctatctcggtctattcttttgatttataagggattttgccgatttcggcctattggttaaaaaatgagctgatttaacaaaaatttaacgcgaattttaacaaaatattaacgtttacaatttcctgatgcggtattttctccttacgcatctgtgcggtatttcacaccgcatagggtaataactgatataattaaattgaagctctaatttgtgagtttagtatacatgcatttacttataatacagttttttagttttgctggccgcatcttctcaaatatgcttcccagcctgcttttctgtaacgttcaccctctaccttagcatcccttccctttgcaaatagtcctcttccaacaataataatgtcagatcctgtagacaccacatcatccacggttctatactgttgacccaatgcatctcccttgtcatctaaacccacaccgggtgtcataatcaaccaatcgtaaccttcatctcttccacccatgtctctttgagcaataaagccgataacaaaatctttgtcgctcttcgcaatgtcaacagtacccttagtatattctccagtagatagggagcccttgcatgacaattctgctaacatcaaaaggcctctaggttcctttgttacttcttctgccgcctgcttcaaaccgctaacaatacctgggcccaccacaccgtgtgcattcgtaatgtctgcccattctgctattctgtatacacccgcagagtactgcaatttgactgtattaccaatgtcagcaaattttctgtcttcgaagagtaaaaaattgtacttggcggataatgcctttagcggcttaactgtgccctccatggaaaaatcagtcaagatatccacatgtgtttttagtaaacaaattttgggacctaatgcttcaactaactccagtaattccttggtggtacgaacatccaatgaagcacacaagtttgtttgcttttcgtgcatgatattaaatagcttggcagcaacaggactaggatgagtagcagcacgttccttatatgtagctttcgacatgatttatcttcgtttcctgcaggtttttgttctgtgcagttgggttaagaatactgggcaatttcatgtttcttcaacactacatatgcgtatatataccaatctaagtctgtgctccttccttcgttcttccttctgttcggagattaccgaatcaaaaaaatttcaaagaaaccgaaatcaaaaaaaagaataaaaaaaaaatgatgaattgaattgaaaagctgtggtatggtgcactctcagtacaatctgctctgatgccgcatagttaagccagccccgacacccgccaacacccgctgacgcgccctgacgggcttgtctgctcccggcatccgcttacagacaagctgtgacaaagggcctcgtgatacgcctatttttataggttaatgtcatgataataatggtttcttaggacggatcgcttgcctgtaacttacacgcgcctcgtatcttttaatgatggaataatttgggaatttactctgtgtttatttatttttatgttttgtatttggattttagaaagtaaataaagaaggtagaagagttacggaatgaagaaaaaaaaataaacaaaggtttaaaaaatttcaacaaaaagcgtactttacatatatatttattagacaagaaaagcagattaaatagatatacattcgattaacgataagtaaaatgtaaaatcacaggattttcgtgtgtggtcttctacacagacaagatgaaacaattcggcattaatacctgagagcaggaagagcaagataaaaggtagtatttgttggcgatccccctagagtcttttacatcttcggaaaacaaaaactattttttctttaatttctttttttactttctatttttaatttatatatttatattaaaaaatttaaattataattatttttatagcacgtgatgaaaaggacccaggtggcacttttcggggaaatgtgcgcggaacccctatttgtttatttttctaaatacattcaaatatgtatccgctcatgagacaataaccctgataaatgcttcaataatattgaaaaaggaagagtatgagtattcaacatttccgtgtcgcccttattcccttttttgcggcattttgccttcctgtttttgctcacccagaaacgctggtgaaagtaaaagatgctgaagatcagttgggtgcacgagtgggttacatcgaactggatctcaacagcggtaagatccttgagagttttcgccccgaagaacgttttccaatgatgagcacttttaaagttctgctatgtggcgcggtattatcccgtattgacgccgggcaagagcaactcggtcgccgcatacactattctcagaatgacttggttgagtactcaccagtcacagaaaagcatcttacggatggcatgacagtaagagaattatgcagtgctgccataaccatgagtgataacactgcggccaacttacttctgacaacgatcggaggaccgaaggagctaaccgcttttttgcacaacatgggggatcatgtaactcgccttgatcgttgggaaccggagctgaatgaagccataccaaacgacgagcgtgacaccacgatgcctgtagcaatggcaacaacgttgcgcaaactattaactggcgaactacttactctagcttcccggcaacaattaatagactggatggaggcggataaagttgcaggaccacttctgcgctcggcccttccggctggctggtttattgctgataaatctggagccggtgagcgtggatctcgcggtatcattgcagcactggggccagatggtaagccctcccgtatcgtagttatctacacgacggggagtcaggcaactatggatgaacgaaatagacagatcgctgagataggtgcctcactgattaagcattggtaactgtcagaccaagtttactcatatatactttagattgatttaaaacttcatttttaatttaaaaggatctaggtgaagatcctttttgataatctcatgaccaaaatcccttaacgtgagttttcgttccactgagcgtcagaccccgtagaaaagatcaaaggatcttcttgagatcctttttttctgcgcgtaatctgctgcttgcaaacaaaaaaaccaccgctaccagcggtggtttgtttgccggatcaagagctaccaactctttttccgaaggtaactggcttcagcagagcgcagataccaaatactgtccttctagtgtagccgtagttaggccaccacttcaagaactctgtagcaccgcctacatacctcgctctgctaatcctgttaccagtggctgctgccagtggcgataagtcgtgtcttaccgggttggactcaagacgatagttaccggataaggcgcagcggtcgggctgaacggggggttcgtgcacacagcccagcttggagcgaacgacctacaccgaactgagatacctacagcgtgagctatgagaaagcgccacgcttcccgaagggagaaaggcggacaggtatccggtaagcggcagggtcggaacaggagagcgcacgagggagcttccagggggaaacgcctggtatctttatagtcctgtcgggtttcgccacctctgacttgagcgtcgatttttgtgatgctcgtcaggggggcggagcctatggaaaaacgccagcaacgcggcctttttacggttcctggccttttgctggccttttgctcacatgttctttcctgcgttatcccctgattctgtggataaccgtattaccgcctttgagtgagctgataccgctcgccgcagccgaacgaccgagcgcagcgagtcagtgagcgaggaagcggaagagcgcccaatacgcaaaccgcctctccccgcgcgttggccgattcattaatgcagctggcacgacaggtttcccgactggaaagcgggcagtgagcgcaacgcaattaatgtgagttacctcactcattaggcaccccaggctttacactttatgcttccggctcctatgttgtgtggaattgtgagcggataacaatttcacacaggaaacagctatgaccatgattacgccaagcgcgcaattaaccctcactaaagggagctagcccccggcggtctctaagaaacaccgccccccctccttcataccaccgagcatggcggccgctcagtgggcaacgcgagagtcgctaagcggcagtggtttcgctcatgtgagactcgagccagtagcaagggcccggtcccacagcttcgacagccaatcaggtgtcgaagacaagcaggcggcgggtaaaccgactcccccgaaggaaggggagggtgggaggacgcccgcgccagagccgatttcactgaccctcccctcgcgcctcgagggatccagacatgataagatacattgatgagtttggacaaaccacaactagaatgcagtgaaaaaaatgctttatttgtgaaatttgtgatgctattgctttatttgtaaccattataagctgcaataaacaagttaacaacaacaattgcattcattttatgtttcaggttcagggggaggtgtgggaggttttttaaagcaagtaaaacctctacaaatgtggtatggctgattatgatctctagtcaaggcactatacatcaaatattccttattaacccctttacaaattaaaaagctaaaggtacacaatttttgagcatagttattaatagcagacactctatgcctgtgtggagtaagaaaaaacagtatgttatgattataactgttatgcctacttataaaggttacagaatatttttccataattttcttgtatagcagtgcagctttttcctttgtggtgtaaatagcaaagcaagcaagagttctattactaaacacagcatgactcaaaaaacttagcaattctgaaggaaagtccttggggtcttctacctttctcttcttttttggaggagtagaatgttgagagtcagcagtagcctcatcatcactagatggcatttcttctgagcaaaacaggttttcctcattaaaggcattccaccactgctcccattcatcagttccataggttggaatctaaaatacacaaacaattagaatcagtagtttaacacattatacacttaaaaattttatatttaccttagagctttaaatctctgtaggtagtttgtccaattatgtcacaccacagaagtaaggttccttcacaaagatccggaccaaagcggccatcgtgcctccccactcctgcagttcgggggcatggatgcgcggatagccgctgctggtttcctggatgccgacggatttgcactgccggtagaactccgcgaggtcgtccagcctcaggcagcagctgaaccaactcgcgaggggatcgagcccggggtgggcgaagaactccagcatgagatccccgcgctggaggatcatccagccggcgtcccggaaaacgattccgaagcccaacctttcatagaaggcggcggtggaatcgaaatctcgtgatggcaggttgggcgtcgcttggtcggtcatttcgaaccccagagtcccgctcagaagaactcgtcaagaaggcgatagaaggcgatgcgctgcgaatcgggagcggcgataccgtaaagcacgaggaagcggtcagcccattcgccgccaagctcttcagcaatatcacgggtagccaacgctatgtcctgatagcggtccgccacacccagccggccacagtcgatgaatccagaaaagcggccattttccaccatgatattcggcaagcaggcatcgccatgggtcacgacgagatcctcgccgtcgggcatgcgcgccttgagcctggcgaacagttcggctggcgcgagcccctgatgctcttcgtccagatcatcctgatcgacaagaccggcttccatccgagtacgtgctcgctcgatgcgatgtttcgcttggtggtcgaatgggcaggtagccggatcaagcgtatgcagccgccgcattgcatcagccatgatggatactttctcggcaggagcaaggtgagatgacaggagatcctgccccggcacttcgcccaatagcagccagtcccttcccgcttcagtgacaacgtcgagcacagctgcgcaaggaacgcccgtcgtggccagccacgatagccgcgctgcctcgtcctgcagttcattcagggcaccggacaggtcggtcttgacaaaaagaaccgggcgcccctgcgctgacagccggaacacggcggcatcagagcagccgattgtctgttgtgcccagtcatagccgaatagcctctccacccaagcggccggagaacctgcgtgcaatccatcttgttcaatcatgcgaaacgatcctcatcctgtctcttgatcagatcttgatcccctgcgccatcagatccttggcggcaagaaagccatccagtttactttgcagggcttcccaaccttaccagagggcgccccagctggcaattccggttcgcttgctgtccataaaaccgcccagtctagctatcgccatgtaagcccactgcaagctacctgctttctctttgcgcttgcgttttcccttgtccagatagcccagtagctgacattcatccggggtcagcaccgtttctgcggactggctttctacgtgttccgcttcctttagcagcccttgcgccctgagtgcttgcggcagcgtgaagctagctttttgcaaaagcctaggcctccaaaaaagcctcctcactacttctggaatagctcagaggccgaggcggcctcggcctctgcataaataaaaaaaattagtcagccatggggcggagaatgggcggaactgggcggagttaggggcgggatgggcggagttaggggcgggactatggttgctgactaattgagatgcatgctttgcatacttctgcctgctggggagcctggggactttccacacctggttgctgactaattgagatgcatgctttgcatacttctgcctgctggggagcctggggactttccacaccctaactgacacacattccacagctgcctcgcgcgtttcggtgatgacggtgaaaacctctgacacatgcagctcccggagacggtcacagcttgtctgtaagcggatgccgggagcagacaagcccgtcagggcgcgtcagcgggtgttggcgggtgtcggggcgcagccatgacccagtcacgtagcgatagcggagtgtatactggcttaactatgcggcatcagagcagattgtactgagagtgcacctcactagttgttaacaggaacgatcgtactcttgataccactcgagtttactccctatcagtgatagagaacgtatgtcgagtttactccctatcagtgatagagaacgatgtcgagtttactccctatcagtgatagagaacgtatgtcgagtttactccctatcagtgatagagaacgtatgtcgagtttactccctatcagtgatagagaacgtatgtcgagtttatccctatcagtgatagagaacgtatgtcgagtttactccctatcagtgatagagaacgtatgtcgaggtaggcgtgtacggtgggaggcctatataagcagagctcgtttagtgaaccgtcagatcgcctggagcggccgcgtatacaagcttgctaccggtatcatcctactgatagtgctagtgtagatcgctactagagccaggcgaattcatggaaccaaggcctggagcttccactagacgccccgaaggaagaccacaacgggaacctgctccagacgtgtgggtattcccttgtgatcgcgatctcccagattcaagtgatagcgaagctgaaacagaggtcggtggacgcggtgatgctgatcatcacgatgatgattctgcttctgaagccgattctaccgatactgagctctttgaaacaggtttattgggacctcaaggtgtcgacggcggagcagtgtccggtggttccccgcctagagaagaggatcctgggagctgtggcggggctccaccgcgcgaagatggcggttcagatgaaggtgatgtttgtgctgtctgtaccgacgaaattgccccgcatctcagatgtgatacttttccttgtatgcatcggttttgtattccttgtatgaagacatggatgcagcttcgaaatacttgtcctctctgtaatgctaaacttgtttatctcattgtcggggttacaccatctggtagcttttcaactattcctatagtaaatgatcctcaaacaagaatggaagcagaagaagctgtgcgggcaggaactgctgtcgatttcatatggactggtaaccaaaggtttgctccaagatatttgacattgggcggtcataccgtaagagcattgtccccaactcatccagaaccgacaaccgatgaagacgatgatgatttggatgatgcggattatgtgcccccagcacctaggagaacaccaagagctcccccaagacggggagcagctgctccacctgtcactggtggcgctagtcatgctgcacctcaaccagcagccgcacgaacggccccgccaagtgcacctattggcccccatgggtcatcaaatacaaatacaacaacaaattcctctggaggaggcggatctcgacaatcacgtgcagccgtccctagaggtgccagcgggccaagcggcggcgtgggtgtggtcgaggcagaagctggaagaccaagagggcgtacagggccactggtgaatcggccggcaccactcgccaataatcgcgatcctatcgtaatttcagattctccgcctgctagtccgcatcgaccgccagcagccccaatgccgggatctgcacctagacctgggccgcctgcaagcgcagcagcaagcggaccagctcggccacgagcagcagtagctccctgcgtccgtgctcccccacctggcccagggccaagagcaccagctccaggagctgaaccagcagcaaggccagccgatgcccgtagagtcccacaatcccattccagcttggcccaagctgccaatcaggagcaaagcctttgtcgtgcccgcgctaccgtagcccgtgggagcggtggccccggagtagaaggcggtcatggcccatctcggggcgcggcgccgagcggggcagctccgtctggagctccacctctgccatctgcagcgagtgtagaacaagaagccgccgttaggcctcgaaaacgccggggctccggtcaagagaatccgagcccacaaagcacacgcccaccgctggcccccgctggagctaaacgagcagccacccatccgccatctgatagcggccctggcggtcggggtcaaggcggcccaggaacacctctcaccagctccgccgcatcagcaagctcttcatctgcgtcaagctcttcagcacccacaccagccggtgcaacatcctctgctacgggcgcagcaagctcatctgccagcgcatctagcggtggcgctgtaggggcgttgggcggcaggcaggaagagacttctctgggacctcgtgccgcaagcggtccacgcggtcctcgcaaatgcgctcgcaaaactagacatgcagaaacgagtggcgctgtgccagctggtggactgactagatatttacctattagcggcgtatcctcagttgtggcattgtccccatatgtaaataaaacaattactggagattgtttgcctattctcgatatggaaactggcaatattggcgcatatgtcgtgcttgtagatcaaactggtaatatggctacacgcctcagggctgcagtgccaggatggtctcgtcgaacattgttgcctgaaactgccggaaatcatgttaccccacctgaatatcccacagcgcctgcaagcgaatggaatagtctgtggatgacgcctgttggaaatatgctctttgatcaagggacgttagttggggcgttggattttaggtcccttcgctcccgccatccttggtctggtgaacaaggtgccagcactcgagatgaaggcaagcagggctcaggcgccaccaactttagcctgctgaagcaggcaggcgacgtcgaggagaaccccggccctgaattcacgcgtatggctagtgaaaataaacaacggccaggttcaccgggtcctacagatggcccaccaccaacaccatctcccgatagagatgaacgtggtgcgcttggctggggtgctgaaaccgaagaaggcggagatgatccggatcatgatccagatcatccgcatgatttagatgatgcacgtcgcgatggccgtgctccggctgccggtacagatgcgggagaagatgctggagatgcggtttctccccggcaacttgccttgttggcatctatggtcgaagaagcagtgcgtaccattcccaccccggatccagctgcatccccaccacgaacaccagcattcagggctgatgatgacgatggtgatgaatatgatgatgcggcagatgctgcgggagatcgagcgcccgcgcgcgggcgggagagagaagctcccctgagaggggcataccccgatccaaccgataggctcagccccaggccccctgctcaaccccctagacggcgacggcatgggcgatggcgcccttcagccagttccacaagttctgattctggctcaagcagtagttcctcagccagttcaagttcttcttccagcgatgaagatgaagatgatgatggtaatgatgccgctgatcatgcccgagaagctcgtgcagtgggcaggggcccttcctcagccgccccagctgctccaggaaggaccccgccaccccctggtcccccacctctgtcagaagcagcccctaaacctagagccgctgcacggacgcctgccgcgtcagccggacgaattgaacggcggagagcacgggccgctgtcgctggaagagatgcgacaggaaggtttacagctggccaaccgagaagagtggaacttgatgcggatgccacttctggggcgttttatgctagataccgggatggatatgtttctggcgaaccatggccaggtgctggcccacctcctcccggcagagtcctttatggtggactcggggattcccgtccaggtctgtggggtgcaccggaagcagaagaagcaagacgtcgttttgaagcatccggagcaccagcagcggtatgggcaccagaactcggagatgcggcccaacaatatgcgttgataacacgactcctctatacgccagatgccgaagctatgggatggcttcaaaatcccagggtagtgccaggagatgtcgccctcgatcaagcatgttttcgcataagtggtgctgccagaaattcatcctcttttattacaggatccgtagctcgagcagtacctcatcttgggtatgcaatggcagcaggacgttttgggtggggtttagcccatgcagccgctgcagtcgctatgtctcgacggtatgatagagctcagaaaggtttcttgctcacttcactcaggcgggcatatgcaccactccttgcaagagaaaatgctgccttaaccggcgcagcaggctctccgggagcaggtgccgatgatgaaggcgtggcagcagtggctgctgctgcgcccggggaacgagcagtaccagcgggctatggagctgcaggcattttggctgctctcggccgacttagcgctgcacctgcgtctccagctggtggtgatgatcctgatgcagcgagacatgctgatgctgatgatgatgctggaagaagggctcaagctgggcgtgttgctgttgaatgtttagctgcgtgtcgaggtatactcgaagccctcgctgaagggtttgatggtgatttggccgctgtgcccggcttggcaggcgcaagaccagcttcaccgcctaggcctgaaggcccggccgggccagcctctccacccccaccacatgctgatgccccacgactcagggcctggttgcgggaattaagatttgttagggatgctttggttttgatgagattgaggggtgatctcagagttgcaggtggttctgaagcagctgtcgcagctgtaagggctgtatcattggttgcaggtgctctcggaccagcccttcccagagatcctcgattaccatcctctgcagctgcggctgcagccgatctccttttcgataatcaatcactcaggcctttgttggccgcagcagcttccgcgcctgatgcggcggatgctctcgcagctgctgcagcatcagctgctcctcgcgaaggaaggaaaaggaaatcccctggacctgctagaccccctggcgggggggggccacgcccaccaaagacaaagaaatccggggcagatgctcctggaagcgatgctagggcacctcttccagccccggctccaccatctaccccaccaggacctgaaccggctcctgcacaacctgccgcacctagggctgctgctgcccaagcaagacctagacctgttgcagtatctaggagaccagcagaagggccagatcctctcggcggatggagacgacaaccgcccggaccttcacatacagccgcacctgcagctgcagcactcgaagcatattgttctccccgagcagtcgctgaattgacagatcatcctcttttcccggtgccatggcgtcccgcgctgatgtttgatccacgcgcactcgcgagcattgctgctaggtgtgcgggcccagcaccagctgcgcaagcagcttgtggtggcggggatgatgatgacaatccacatccgcatggtgcagctggcgggcgattgttcggtccactcagagctagcggaccccttagaaggatggctgcatggatgagacaaattccagatcctgaagatgttcgggtagttgtcttgtattcacccttacccggtgaagatcttgcaggggggggcgctagcggcggaccgcccgaatggtctgcagaacggggcggtctttcttgtctccttgctgcattagctaatcgcctctgtggaccagatacagctgcttgggccggaaactggactggggcaccagatgttagtgcattgggagcgcaaggagtccttctcctcagtacaagagatttggcttttgctggtgctgtcgagttcctcggtctcttggcatccgcaggagatcgcaggcttattgtagtgaatacagttcgggcatgtgattggccggctgatggtcctgccgtctctaggcaacatgcatatctcgcttgtgaactcttacctgctgttcaatgtgcagtaaggtggcctgccgcccgtgatctccggcggactgttttagctagcggaagagtctttggaccaggcgtgtttgctcgtgtcgaagctgctcatgctcgattgtatccggatgcacccccattgaggctctgtaggggcgggaatgtaaggtatagagttaggactcggtttggaccagataccccagttccaatgtctccaagagaatatcggcgcgcggttctccccgcattggatggacgcgctgccgcatcaggcacaacggatgctatggcccctggggcccccgacttttgtgaagaagaagctcatagccatgctgcttgtgcccggtggggtctcggggctcccttacgccctgtttatgttgccctcggtcgggaagccgttcgggcaggacctgcgcgctggcggggtccccgtcgcgatttctgtgcacgagctttattggaacctgatgatgatgctccaccccttgtattaagaggtgatgatgatggacccggcgcactcccaccagcaccaccgggcatcaggtgggcatccgctacaggtcgatccgggacggttttggccgctgcaggagcggttgaagtcctcggcgctgaagcaggtctggcgacacccccaaggagagaggtcgtagattgggaaggagcatgggatgaggatgatggtggggcatttgaaggcgatggagtattaggcagtggagagggcagaggaagtctgctaacatgcggtgacgtcgaggagaatcctggcccaacgcgtaccggtatggccacagatatagacatgctgatagatcttggactcgatctgagtgattccgacctcgatgaagatccaccggaaccagccgaaagtcgtcgagatgatctcgagtcagattccaatggcgaatgctcatccagtgatgaagatatggaagatccacatggtgaagatggtcctgaacccatcctggatgcggcacggccagctgtgcggcccagtcgacctgaggatccaggagtgccaagtacgcaaaccccgaggcctactgaacgtcaagggccgaatgacccacagcccgccccacattctgtatggtcccggttgggagctagaagaccatcatgtagtccagaacgacatggcggaaaagtagctaggctgcagccaccgccaactaaggcgcaaccagctagaggcggtaggcgaggacgcaggcgaggccgaggcaggggcggacctggcgcagcagacggcctgagcgatccacgaaggagagcacctcggactaacagaaatcctggcgggccacgtcctggcgctggttggaccgatggtccgggtgcacctcacggagaagcctggcgtggctccgaacaaccagatcccccaggcggtccacgaactagatccgttaggcaggctccacccccgctcatgaccttggcaatagcaccgcccccagccgatcctcgagcacctgctcctgaacggaaagcccctgcagcggatacaattgatgcgacaacccgactggtgttgaggtctatttctgaacgggctgcagtggatcgaatatccgaatcttttgggagatctgcccaagtgatgcatgatccattcggcggacaaccattcccagctgctaacagtccatgggcaccagtcttggctggtcagggcggccctttcgatgctgaaactcggcgtgtatcttgggagacacttgtagcacatgggccatccctgtaccggaccttcgcaggaaacccgcgcgctgcttcaactgctaaagctatgagagattgtgtactcagacaggagaactttatagaagcacttgctagcgcagatgaaaccttagcttggtgtaaaatgtgtattcatcataatcttcctcttcgtccgcaagatccaataattggcacagcagctgcagttttggacaatctggctactaggttgagacctttcttgcaatgttatctcaaagccagagggctctgtggtctcgatgagctctgctcaagaagaagattggccgatatcaaagatatcgccagctttgtcttcgtgatacttgcacggcttgctaatagggtagaacgcggggtggccgaaattgattatgccacactcggggtgggagtaggggagaaaatgcacttttatcttccgggtgcgtgtatggccggattgatagagattctggatactcatcggcaagaatgctcttccagagtgtgtgaactgacagcatctcatattgtggctcccccgtatgtacatgggaagtacttctactgtaattcactcttcaccggttaagatcataatcagccataccacatttgtagaggttttacttgctttaaaaaacctcccacacctccccctgaacctgaaacataaaatgaatgcaattgttgttgttaacttgtttattgcagcttataatggttacaaataaagcaatagcatcacaaatttcacaaataaagcatttttttcactgcattctagttgtggtttgtccaaactcatcaatgtatcttatcatgtctggggtacccattttccgctcccttctccctccccctccggttgccgcagggcgggcctccctcccgcctgcatccagccacccctttccctcccaacgtaacaaacattatgttcccgacttcccacccgcttagcgactctcgcgttgcggtacccaattcgccctatagtgagtcgtattacgcgcgctcactggccgtcgttttacaacgtcgtgactgggaaaaccctggcgttacccaacttaatcgccttgcagcacatccccctttcgccagctggcgtaatagcgaagaggcccgcaccgatcgcccttcccaacagttgcgcagcctgaatggcgaatggcgcgacgcgccctgtagcggcgcattaagcgcggcgggtgtggtggttacgcgcagcgtgaccgctacacttgccagcgccctagcgcccgctcctttcgctttcttcccttcctttctcgccacgttcgccggctttccccgtcaagctctaaatcgggggctccctttagggttccgatttagtgctttacggcacctcgaccccaaaaaacttgattagggtgatggttcacgtagtgggccatcgccctgatagacggtttttcgccctttgacgttggagtccacgttctttaatagtggactcttgttccaaactggaacaa

SEQ ID NO: 9 - DNA, 142216 bp, synthetic construct
  source 1..142216: mol_type = other DNA
cattcttaaggaacttgaaaagccagcaccctgatgcgacctcgttttagtctacgtttatctgtctttacttaatgtcctttgttacaggccagaaagcataactggcctgaatattctctctgggcccactgttccacttgtatcgtcggtctgataatcagactgggaccacggtcccactcgtatcgtcggtctgattattagtctgggaccacggtcccactcgtatcgtcggtctgattattagtctgggaccacggtcccactcgtatcgtcggtctgataatcagactgggaccacggtcccactcgtatcgtcggtctgattattagtctgggaccatggtcccactcgtatcgtcggtctgattattagtctgggaccacggtcccactcgtatcgtcggtctgattattagtctggaaccacggtcccactcgtatcgtcggtctgattattagtctgggaccacggtcccactcgtatcgtcggtctgattattagtctgggaccacgatcccactcgtgttgtcggtctgattatcggtctgggaccacggtcccacttgtattgtcgatcagactatcagcgtgagactacgattccatcaatgcctgtcaagggcaagtattgacatgtcgtcgtaacctgtagaacggagtaacctcggtgtgcggttgtatgcctgcggtggattgctgctgtgtcctgcttatccacaacattttgcgcacggttatgtggacgggcctatacatgtgtatatatgtatacctatgaatgtcagtaagtatgtatacgaacagtatgatactgaagatgacaaggtaatgcatcattctatacgtgtcattctgaacgaggcgcgctttccttttttctttttgctttttctttttttttctcttgaactcgacggatctatgcggtgtgaaataccgcacagatgcgtataacttcgtatagcatacattatacgaagttattaatgacagaatataaaccaacagtccggctggctacacgagatgatgtacctcgcgctgtgagaacactggctgctgcttttgctgattatccggcgacaagacatactgttgaccccgatagacatattgaacgcgtgacagaattgcaggagctgtttctgactagggtgggtttagatattggtaaagtttgggtggccgatgatggagcagccgtagctgtgtggacaaccccagaatctgttgaggccggagccgtctttgctgaaattggacccagaatggcagaactgtctggctctaggctcgcggcccaacagcaaatggaaggattgctcgcacctcatcgccctaaagaacctgcctggtttctcgctacggtaggggtgtccccagatcatcaaggtaaaggcctcggatccgctgtggtcctgccaggggtcgaagctgcggaaagagcaggagttccagcatttcttgaaacatctgcacctaggaatctgcccttttatgaaaggctgggatttacagtaactgcagatgttgaagtaccagagggtccccggacatggtgtatgacgagaaaaccaggggcgggctcaggcgccaccaactttagcctgctgaagcaggcaggcgacgtcgaggagaaccccggccctatggtgagcaagggcgaggagctgttcaccggggtggtgcccatcctggtcgagctggacggcgacgtaaacggccacaagttcagcgtgtccggcgagggcgagggcgatgccacctacggcaagctgaccctgaagttcatctgcaccaccggcaagctgcccgtgccctggcccaccctcgtgaccaccttcggctacggcctgaagtgcttcgcccgctaccccgaccacatgaagcagcacgacttcttcaagtccgccatgcccgaaggctacgtccaggagcgcaccatcttcttcaaggacgacggcaactacaagacccgcgccgaggtgaagttcgagggcgacaccctggtgaaccgcatcgagctgaagggcatcgacttcaaggaggacggcaacatcctggggcacaagctggagtacaactacaacagccacaacgtctatatcatggccgacaagcagaagaacggcatcaaggtgaacttcaagatccgccacaacatcgaggacggcagcgtgcagctcgccgaccactaccagcagaacacccccatcggcgacggccccgtgctgctgcccgacaaccactacctgagctaccagtccgccctgagcaaagaccccaacgagaagcgcgatcacatggtcctgctggagttcgtgaccgccgccgggatcactctcggcatggacgagctgtacaagtgaagttcctatactctagaaagaataggaacttctaagatcataatcagccataccacatttgtagaggttttacttgctttaaaaaacctcccacacctccccctgaacctgaaacataaaatgaatgcaattgttgttgttaacttgtttattgcagcttataatggttacaaataaagcaatagcatcacaaatttcacaaataaagcatttttttcactgcattctagttgtggtttgtccaaactcatcaatgtatcttatcatgtctggagagaccataacttcgtataggatactttatacgaagttataacctggtctcagctaggaaaccagtacaaaggcaacatcctcacttgggtgaacggaaacgcagtattatggttactttttggatacgtgaaacatatcccatggtagtccttagacttgggagtctatcacccctagggcccatatctggaaatagacgccaggttgaatccgtatttggaggtacgatggaacagtctgggtgggacgtgcttcttaattaacgggtcttttgtgttggccctaataaaaaaaaactcaggggatttttgctgtctgttgggaaataaaggtttacttttgtatcttttccctgtctgtgttggatgtatcgcggggatgcgtgggagtgggggtgcgtgggagtgggggtgcgtgggagtgggggtgcgtgggagtgggggtgcgtgggagtgggggtgcgtgggagtgggggtgcgtgggagtgggggtgccatgttgggcaggctctggtgttaaccacagagccgcggcccgggctgcctgaccaccgatccccgaaagcatcctgccactggcatggagccagaaccacagtgggttgggtgtgggtgttaagtttccgcgagcgcctgcccgcccggactgacctggcctctggccgccacaaagggcggggggggttaactacactatagggcaacaaaggatgggaggggtggcggggcgggacggggcgcccaaaagggggtcggccacaccacagacccatagagcccaccgcatccccagcatgcctgctattgtcttcccaatcctcccccttgctgtcctgccccaccccaccccccagaatagaatgacacctactcagacaatgcgatgcaatttcctcattttattaggaaaggacagtgggagtggcaccttccagggtcaaggaaggcacgggggaggggcaaacaacagatggctggcaactagaaggcacaggaattcacttgtacagctcgtccatgcccatcacatcggtaaacgccttttgccactccttgaagttcagctcggtcttggagtgcttgagttccgtcttacggaacacgtacatcggctggttcttcagatagttagccgccattggcttggcaaaggtgtaggtggtccgcgcagtgctccggtagcgcttgccatttccagtggtgtaactccacttaaaggtactgatgatggttttgtcgttggggtaagtcttcttcgacctgcaccagtccgcagcggtcagcgagttggtcatcacaggaccgtcagcagggaaaccagtccccttcacctgggcctctcctttgatgtggcttccctcgtaggtgtagcggtagttcacagtaagggaggcaccatcttcaaactgcattgtgcgatggacttggtatccagagccatctaccatggcggcctggaaaggcgacatcccgtcagggtagggcaggtactgatggaagccatacccgatatgagggaccagaatccagggggagaactggaggtcgcccttggtggacttcaggtttaactcctcataaccatcatttggattgccggtgccctgacccaccatgtcaaagtccacaccgttgatggagccaaagatgtgtaactcatgtgtcgctgggagagaggccatgttatcctcctcacccttgctcactgggccgggattttcctccacgtccccgcatgttagaagacttcccctgccctcgccggagcccccaccgtactcgtcaattccaagggcatcggtaaacatctgctcaaactcgaagtcggccatatccagagcgccgtagggggcggagtcgtggggggtaaatcccggccccggggaatccccgtcccccaacatgtccagatcgaaatcgtctagcgcgtcggcatgcgccatcgccacgtcctcgccgtctaagtggagctcgtcccccaggctgacatcggtcgggggggccgtcgacagtctgcgcgtgtgtcccgcggggagaaaggacaggcgcggagccgccagccccgcctcttcgggggcgtcgtcgtccgggagatcgagcaggccctcgatggtagacccgtaattgtttttcgtacgcgcgcggctgtacgcgtgttcccgcatgaccgcctcggagggcgaggtcgtgaagctggaatacgagtccaacttcgcccgaatcaacaccataaagtacccagaggcgcgggcctggttgccatgcagggtgggaggggtcgtcaacggcgcccctggctcctccgtagccgcgctgcgcaccagcgggaggttaaggtgctcgcgaatgtggtttagctcccgcagccggcgggcctcgattggcactccccggacggtgagcgctccgttgacgaacatgaagggctggaacagacccgccaactgacgccagctctccaggtcgcaacagaggcagtcaaacaggtcgggccgcatcatctgctcggcgtacgcggcccataggatctcgcgggtcaaaaatagatacaaatgcaaaaacaaaacacgcgccagacgagcggtctctcggtagtacctgtccgcgatcgtggcgcgcagcatttctcccaggtcgcgatcgcgtccgcgcatgtgcgcctggcggtgcagctgccggacgctggcgcgcaggtaccggtacagggccgagcagaagttggccaacacggttcgatagctctcctcccgcgcccgtagctcggcgtggaagaaacgagagagcgcttcgtagtagagcccgaggccgtcgcgggtggccggaagcgtagggaaggccacgtcgccgtgggcgcgaatgtcgatttgggtgcgttcggggacgtacgcgtccccccattccaccacatcgctgggcagcgttgataggaatttacactcccggtacaggtcggcgttggtcggtagcgccgaaaacagatcctcgttccaggtatcgagcatggtacatagcgcggggcccgcgctaaagcccaagtcgtcgaggagacggttaaagagggcggcgggggggacgggcatgggtggggagggcatgagctgggcctggctcaggcgccccgttgcgtacagcgggggggccgccggggtgtttttgggacccccggccgggcgggggggcggtggcgaagcgccgtccgcgttcatgtcggcaaacagctcgtcgaccaagaggtccattttacgagggtaggaagtggtacggaaagttggtataagacaaaagtgttgtggaattgaagtttactcaaaaaatcagcactcttttataggcgccctggtttacataagcaaagcttatacgttctctatcactgatagggagtaaactggatatacgttctctatcactgatagggagtaaactgtagatacgttctctatcactgatagggagtaaactggtcatacgttctctatcactgatagggagtaaactccttatacgttctctatcactgatagggagtaaagtctgcatacgttctctatcactgatagggagtaaactcttcatacgttctctatcactgatagggagtaaactcgaggggatccgtgggtgttggggggtggggcagaggggtggggggggagacagaaacaggaacatagttagaaaacaagaatgcggtgcagccagagaatcacaggagacgaggggatgggcgtgttggttaccaacccacacccaggcatgctcggtggtatgaaggagggggggcggtgtttcttagagaccgccgggggacgtggggttggtgtgcaaaggcacgcgcacccgcgccggccaggtgggccggtaccccatccccccctcccccgacccttcccacccccgcgtgccagagatcaccccggtcccccggcacccgccactcctccatatcctcgctttaggaacaactttaggggggggtacacacgcgccgtgcatttccttccacacccccccccctcccccgcactcccccccccccccaggcagtaagacccaaacatagagagccaggcacaaaaacacaggcggggtgggacacatgccttcttggagtacgtgggtcattggcgtggggggttacagcgacaccggccgaccccctggcggtcttccagccggcccttagataagggggcagttggtggtcggacgggtaagtaacagagtctaactaagggtgggagggggggaaaataacgggctggtgtgctgtaacacgagcccacccgcgagtggcgtggccgaccttagcctctggggcgccccctgtcgtttgggtccccccccctctattggggagaagcaggtgtctaacctacctggaaacgcggcgtctttgttgaacgacaccggggcgccctcgacgagtgggataacgggggaggaagggagggaggagggtactgggggtgaagggggggggaagaagcgagaacaggaaaggcgacggagcccggcagaacaccgagaaaaaaaaacgcagcgcatgcgccgggccgttgtggggccccgggccggggccccttgggtccgccggggccccgggccgggccgccacgggggccggccgttggcggtaaccccgagtgttcatctcaggccccgggccgggaacccggaaaagcctccggggggcctttttcgcgtcgcgtgccggcgagcgggtccggacggggcccggaccgccgcggtcgggggcccctcgtcccgggccgtacgcggccttcgccccgtgaggggacagacgaacgaaacattccggcgacggaacgaaaaacaccccagacgggttaaagaaacagaaaccgcaacccccaccacccccgaaacggggaaaacgaaaaaacagaccagcggccggccggcgcttagggggaggatgtcgccgacgccccttggccgccccggctgcaggggggcccggagagccgcggcacccggacgcgcccggaaagtctttcgcaccaccggcgatcggcacggccgcgcccccgcttttataaaggctcagatgacgcagcaaaaacaggccacagcaccacatgggtaggtgatgtaattttattttcctcgtctgcggcctaatggatttccgggcgcggtgcccctgtctgcagagcacttaacggattgatatctcgcgggcacgcgcgcccttaatggaccggcgcggggcggggggccggatacccacacgggcggggggggggtgtcgcgggccgtctgctggcccgcggccacataaacaatgactcggggcctttctgcctctgccgcttgtgtgtgcgcgcgccggctctgcggtgtcggcggcggcggcggcggtggccgccgtgttcggtctcggtagccggccggcgggtggactcgcggggggccggagggtggaaggcaggggggtgtaggatgggtatcaggacttccacttcccgtccttccatcccccgttcccctcggttgttcctcgcctcccccaacaccccgccgctttccgttggggttgttattgttgtcgggatcgtgcgggccgggggtcgccggggcaggggcgggggcgtgggcgggggtgctcgtcgatcgaccgggctcagtgggggcgtggggtgggtgggagaaggcgaggagactggggtgggggtgtcggtgggtggttgttttttttttttgtggttgttttttgtgtctgtttccgtcccccgtcacccccctccctccgtcccctccgtccccccgtcgcgggtgtttgtgtttgtttattccgacatcggtttatttaaaataaacacagccgttctgcgtgtctgttcttgcgtgtggctgggggcttatatgtggggtcccgggggcgggatggggtttagcggcggggggcggcgcgccggacggggcgctggagataacggcccccggggaacgggggaccggggctgggtatcccgaggtgggtgggtgggcggcggtggccgggccgggccgggccgggccgggtgggcggggtttggaaaaacgaggaggaggaggagaaggcggggggggagacggggggaaagcaaggacacggcccggggggtgggagcgcgggccgggccgctcgtaagagccgcgacccggccgccggggagcgttgtcgccgtcggtctgccggcccccgtccctcccttttttgaccaaccagcgccctcccccccaccaccattcctactaccaccaccaccaccacccccaccaccgacacctcccgcgcacccccgcccacatccccccaccccgcaccacgagcacggggtgggggtagcaggggatcaaaggggggcaaagccggcggggcggttcgggggggcgggagaccgagtaggcccgcccatacgcggcccctcccggcagccacgccccccagcgttgggtgtcacggggaaagagcaggggagagggggggagaggggagagggggggagaggggagagggggggagaggggagagggggggagaggggagagggggggagaggggagagggggggagaggggagagggggggagaggggagagggggggagagggggtatataaaccaacgaaaagcgcgggaacggggatacggggcttgtgtggcacgacgtcgtggttgtgttactgggcaaacacttggggactgtaggtttctgtgggtgccgaccctaggcgctatggggattttgggttgggtcgggcttattgccgttggggttttgtgtgtgcgggggggcttgtcttcaaccgaatatgttattcggagtcgggtggctcgagaggtgggggatatattaaaggtgccttgtgtgccgctcccgtctgacgatcttgattggcgttacgagaccccctcggctataaactatgctttgatagacggtatatttttgcgttatcactgtcccggattggacacggtcttgtgggataggcatgcccagaaggcatattgggttaacccctttttatttgtggcgggttttctggaggacttgagtcaccccgcgtttcctgccaacacccaggaaacagaaacgcgcttggccctttataaagagatacgccaggcgctggacagtcgcaagcaggccgccagccacacacctgtgaaggctgggtgtgtgaactttgactattcgcgcacccgccgctgtgtagggcgacaggatttgggacctaccaacggaacgtctggacggaccccggttctgccgccggacgatgaagcgggcctgcaaccgaagcccctcaccacgccgccgcccatcatcgccacgtcggaccccaccccgcgacgggacgccgccacaaaaagcagacgccgacgaccccactcccggcgcctctaacgatgcctcgacggaaacccgtccgggttcggggggcgaaccggccgcctgtcgctcgtcagggccggcgggcgctcctcgccgccctagaggctgtcccgctggtgtgacgttttcctcgtccgcgccccccgaccctcccatggatttaacaaacgggggggtgtcgcctgcggcgacctcggcgcctctggactggaccacgtttcggcgtgtgtttctgatcgacgacgcgtggcggcccctgatggagcctgagctggcgaaccccttaaccgcccacctcctggccgaatataatcgtcggtgccagaccgaagaggtgctgccgccgcgggaggatgtgttttcgtggactcgttattgcacccccgacgaggtgcgcgtggttatcatcggccaggacccatatcaccaccccggccaggcgcacggacttgcgtttagcgtgcgcgcgaacgtgccgcctcccccgagtcttcggaatgtcttggtggccgtcaagaactgttatcccgaggcacggatgagcggccacggttgcctggaaaagtgggcgcgggacggcgtcctgttactaaacacgaccctgaccgtcaagcgcggggcggcggcgtcccactctagaatcggttgggaccgcttcgtgggcggagttatccgccggttggccgcgcgccgccccggcctggtgtttatgctctggggcgcacacgcccagaatgccatcaggccggaccctcgggtccattgcgtcctcaagttttcgcacccgtcgcccctctccaaggttccgttcggaacctgccagcatttcctcgtggcgaaccgatacctcgagacccggtcgatttcacccatcgactggtcggtttgaaaggcatcgacgtccggggtttttgtcggtgggggcttttgggtatttccgatgaataaagacggttaatggttaaacctctggtctcatacgggtcggtgatgtcgggcgtcgggggagagggagttccctctgcgcttgcgattctagcctcgtggggctggacgttcgacacgccaaaccacgagtcggggatatcgccagatacgactcccgcagattccattcggggggccgctgtggcctcacctaaccaacctttacacgggggcccggaacgggaggccacagcgccgtctttctccccaacgcgcgcggatgacggcccgccctgtaccgacgggccctacgtgacgtttgataccctgtttatggtgtcgtcgatcgacgaattagggcgtcgccagctcacggacaccatccgcaaggacctgcggttgtcgctggccaagtttagcattgcgtgcaccaagacctcctcgttttcgggaaacgccccgcgccaccacagacgcggggcgttccagcgcggcacgcgggcgccgcgcagcaacaaaagcctccagatgtttgtgttgtgcaaacgcgcccacgccgctcgagtgcgagagcagcttcgggtcgttattcagtcccgcaagccgcgcaagtattacacgcgatcttcggacgggcggctctgccccgccgtccccgtgttcgtccacgagttcgtctcgtccgagccaatgcgcctccaccgagataacgtcatgctggcctcgggggccgagtaaccgccccccccccatgccaccctcactgcccgtcgcgcgtgtttgatgttaataaataacacataaatttggctggttgtttgttgtctttaatggaccgcccgcaagggggggggggcgtttcagtgtcgggtgacgagcgcgatccggccgggatcctaggaccccaaaagtttgtctgcgtattccagggtggggctcagttgaatctcccgcagcacctctaccagcaggtccgcggtgggctggagaaactcggccgtcccggggcaggcggttgtcgggggtggaggcgcggcgcccaccccgtgtgccgcgcctggcgtctcctctgggggcgacccgtaaatggttgcagtgatgtaaatggtgtccgcggtccagaccacggtcaaaatgccggccgtggcgctccgggcgctttcgccgcgcgaggagctgacccaggagtcgaacggatacgcgtacatatgggcgtcccacccgcgttcgagcttctggttgctgtcccggcctataaagcggtaggcacaaaattcggcgcgacagtcgataatcaccaacagcccaatgggggtgtgctggataacaacgcctccgcgcggcaggcggtcctggcgctcccggccccgtaccatgatcgcgcgggtgccgtactcaaaaacatgcaccacctgcgcggcgtcgggcagtgcgctggtcagcgaggccctggcgtggcataggctatacgcgatggtcgtctgtggattggacatctcgcggtgggtagtgagtcccccgggccgggttcggtggaactgtaaggggacggcgggttaatagacaatgaccacgttcggatcgcgcagagccgatagtatgtgctcactaatgacgtcatcgcgctcgtggcgctcccggagcggatttaagttcatgcgaaggaattcggaggaggtggtgcgggacatggccacgtacgcgctgttgaggcgcaggttgccgggcgtaaagcagatggcgaccttgtccaggctaaggccctgggagcgcgtgatggtcatggcaagcttggagctgatgccgtagtcggcgtttatggccatggccagctccgtagagtcaatggactcgacaaactcgctgatgttggtgttgacgacggacatgaagccgtgttggtcccgcaagaccacgtaaggcaggggggcctcttccagtaactcggccacgttggccgtcgcgtgccgcctccgcagctcgtccgcaaaggcaaacacccgtgtgtacgtgtatcccatgagcgtataattgtccgtctgcagggcgacggacatcagccccccgcgcggcgagccggtcagcatctcgcagccccggaagataacgttgtccacgtacgtgctaaagggggcgacttcaaatgcctccccgaagagctcttggaggattcggaatctcccgaggaaggcccgcttcagcagcgcaaactgggtgtgaacggcggcggtggtctccggttccccgggggtgtagtggcagtaaaacacgtcgagctgttgttcgtccagccccgcgaaaataacgtcgaggtcgtcgtcgggaaaatcgtccgggcccccgtcccgcggccccagttgcttaaaatcaaacgcacgctcgccgggggcgcctgcgtcggccattaccgacgcctgcgtcggcacccccgaagatttggggcgcagagacagaatctccgccgttagttctcccatgcgggcgtacgcgagggtcctctgggtcgcatccaggcccgggcgctgcagaaagttgtaaaaggagataagcccgctaaatatgagccgcgacaggaacctgtaggcaaactccaccgaagtctccccctgagtctttacaaagctgtcgtcacgcaacactgcctcgaaggcccggaacgtcccactaaacccaaaaaccagttttcgcaggcgcgcggtcaccgcgatctggctgttgaggacgtaagtgacgtcgttgcgggccacgaccagctgctgtttgctgtgcacctcgcagcgcatgtgccccgcgtcctggtcctggctctgcgagtagttggtgatgcggctggcgttggccgtgagccacttttcaatagtcaggccgggctggtgtgtcagccgtcggtattcgtcaaactccttgaccgacacgaacgtaagcacggggagggtgaacacgacgaactccccctcacgggtcaccttcaggtaggcgtggagcttggccatgtacgcgctcacctctttgtgggaggagaacagccgcgtccagccggggaggttggcggggttggtgatgtagttttccgggacgacgaagcgatccacgaactgcatgtgctcctcggtgatgggcaggccgtactccagcaccttcatgaggttaccgaactcgtgctcgacgcaccgtttgttgttaataaaaatggcccagctatacgagaggcgggcgtactcgcgcagcgtgcggttgcagatgaggtacgtgagcacgttctcgctctggcggacggaacaccgcagtttctggtgctcgaaggtcgactccagggacgccgtctgcgtcggcgagcccacacacaccaacacgggccgcaggcgggccgcgtactggggggtgtggtacagggcgttaatcatccaccagcaatacaccacggccgtgaggaggtgacgcccaaggagcccggcctcgtcgatgacgatcacgttgctgcgggtaaaggccggcagcgccccgtgggtggccggggccaaccgcgtcagggcgccctcggccaaccccagggtccgttccagggcggccagggcgcgaaactcgttccgcaactcctcgcccccggaggcggccagggcgcgcttcgtgaggtccaaaatcacctcccagtagtacgtcagatctcgtcgctgcaggtcctccagcgaggcggggttgctggtcagggtgtacgggtactgtcccagttgggcctggacgtgattcccgcgaaacccaaattcatgaaagatggtgttgatgggtcggctgagaaaggcgcccgagagtttggcgtacatgttttgggccgcaatgcgcgtggcgcccgtcaccacacagtccaagacctcgttgattgtctgcacgcacgtgctctttccggagccagcgttgccggtgataagatacaccgcgaacggaaactccctgaggggcaggcctgcgggggactctaaggccgccacgtcccggaaccactgcagacggggcacttgcgctccgtcgagctgttgttgcgagagctctcggatgcgcttaaggattggctgcaccccgtgcatagacgtaaaatttaaaaaggcctcggccctccctggaacggctggtcggtccccgggttgctgaaggtgcggcgggccgggtttctgtccgtctagctggcgctccccgccggccgccgccatgaccgcaccacgctcgtgggcccccactacgcgtgcgcggggggacacggaagcgctgtgctcccccgaggacggctgggtaaaggttcaccccacccccggtacgatgctgttccgtgagattctccacgggcagctggggtataccgagggccagggggtgtacaacgtcgtccggtccagcgaggcgaccacccggcagctgcaggcggcgatctttcacgcgctcctcaacgccaccacttaccgggacctcgaggcggactggctcggccacgtggcggcccgcggtctgcagccccaacggctggttcgccggtacaggaacgcccgggaggcggatatcgccggggtggccgagcgggtgttcgacacgtggcggaacacgcttaggacgacgctgctggactttgcccacgggttggtcgcctgctttgcgccgggcggcccgagcggcccgtcaagcttccccaaatatatcgactggctgacgtgcctggggctggtccccatattacgcaagcgacaagaagggggtgtgacgcagggtctgagggcgtttctcaagcagcacccgctgacccgccagctggccacggtcgcggaggccgcggagcgcgccggccccgggttttttgagctggcgctggccttcgactccacgcgcgtggcggactacgaccgcgtgtatatctactacaaccaccgccggggcgactggctcgtgcgagaccccatcagcgggcagcgcggagaatgtctggtgctgtggccccccttgtggaccggggaccgtctggtcttcgattcgcccgtccagcggctgtttcccgagatcgtcgcgtgtcactccctccgggaacacgcgcacgtctgccggctgcgcaataccgcgtccgtcaaggtgctgctggggcgcaagagcgacagcgagcgcggggtggccggtgccgcgcgggtcgttaacaaggtgttgggggaggacgacgagaccaaggccgggtcggccgcctcgcgcctcgtgcggcttatcatcaacatgaagggcatgcgccacgtaggcgacattaacgacaccgtgcgtgcctacctcgacgaggccggggggcacctgatagacgccccggccgtcgacggtaccctccctggattcggcaagggcggaaacagccgcgggtctgcgggccaggaccagggggggcgggcgccgcagcttcgccaggccttccgcacggccgtggttaacaacatcaacggcgtgttggagggctatataaataacctgtttggaaccatcgagcgcctgcgcgagaccaacgcgggcctggcgacccaattgcaggagcgcgaccgcgagctccggcgcgcaacagcgggggccctggagcgccagcagcgcgcggccgacctggcggccgagtccgtgaccggtggatgcggcagccgccctgcgggggcggacctgctccgggccgactatgacattatcgacgtcagcaagtccatggacgacgacacgtacgtcgccaacagctttcagcacccgtacatcccttcgtacgcccaggacctggagcgcctgtcgcgcctctgggagcacgagctggtgcgctgttttaaaattctgtgtcaccgcaacaaccagggccaagagacgtcgatctcgtactccagcggggcgatcgccgcattcgtcgccccctactttgagtcagtgcttcgggccccccgggtaggcgcgcccatcacgggctccgatgtcatcctgggggaggaggagttatgggatgcggtgtttaagaaaacccgcctgcaaacgtacctgacagacatcgcggccctgttcgtcgcggacgtccagcacgcagcgctgcccccgcccccctccccggtcggcgccgatttccggcccggcgcgtccccgcggggccggtccagatcgcggtcgcccggaagaactgcgccaggcgcgccggaccagggcgggggcatcgggcaccgggatggccgccgcgacggccgacgatgaggggtcggccgccaccatcctcaagcaggccatcgccggggaccgcagcctggtcgaggcggccgaggcgattagccagcagacgctgctccgcctggcctgcgaggtgcgccaggtcggcgaccgccagccgcggtttaccgccaccagcatcgcgcgcgtcgacgtcgcgcctgggtgccggttgcggttcgttctggacgggagtcccgaggacgcctatgtgacgtcggaggattactttaagcgctgctgcggccagtccagttatcgcggcttcgcggtggcggtcctgacggccaacgaggaccacgtgcacagcctggccgtgccccccctcgttctgctgcaccggttctccctgttcaaccccagggacctcctggactttgagcttgcctgtctgctgatgtacctggagaactgcccccgaagccacgccaccccgtcgacctttgccaaggttctggcgtggctcggggtcgcgggtcgccgcacgtccccattcgaacgcgttcgctgccttttcctccgcagttgccactgggtcctaaacacactcatgttcatggtgcacgtaaaaccgttcgacgacgagttcgtcctgccccactggtacatggcccggtacctgctggccaacaacccgccccccgttctctcggccctgttctgtgccaccccgacgagctcctcattccggctgccggggccgcccccccgctccgactgcgtggcctataaccccgccgggatcatggggagctgctgggcgtcggaggaggtgcgcgcgcctctggtctattggtggctttcggagaccccaaaacgacagacgtcgtcgctgttttatcagttttgttgaattttaggaaataaacccggttttgtttctgtggcctcccgacggatgcgcgtgtccttcctccgtcttggtgggtgggtgtctgtgtatcgcgtcccatctgtgcggagagggggggcatgtcggcacgtattcggacagactcaagcacacacgggggagcgctcttgtctcagggcaatgtttttattggtcaaactcaggcaaacagaaacgacatcttgtcgtcaaagggatacacaaacttccccccctctccccatactcccgccagcaccccggtaaacaccaactcaatctcgcgcaggatttcgcgcaggtgatgagcgcagtccacgggggggagcacaaggggccgcgggtatagatcgacggggacgccgaccgactccccgcctccgggacagacacgcacgacgcgccgccagtagtgctctgcgtccagcaaggcgccgccgcggaaggcagtggggggcaaggggtcgctagcctcaaagggggacacccgaacgctccagtactccgcgtccaaccgtttattaaacgcgtccacgataaggcggtcgcaggcgtcctccataaggccccgggccgtgagtgcgtcctcctccggcacgcctgccgttgtcaggcccaggacccgtcgcagcgtgtcgcgtacgaccccggccgccgtggtgtacgcgggcccgcggagaggaaatcccccaagatggtcagtgttgtcgcgggagttccagaaccacactcccgcctggttccaggcgactgcgtgggtgtagacgccctcgagggccaggcacagtgggtgccgcagccggaggccgttggccctaagcacggctcccacggccgtctcgatggcccgccgggcgtcctcgatcaccccggaagccgcatccgcgtcttgggggtccacgttaaagacaccccagaacgcacccccatcgcccccgcagaccgcgaacttcaccgagctggccgtctcctcgatctgcaggcagacggcggccattaccccacccaggagctgccgcagcgcagggcaggcgtcgcacgtgtccgggaccaggcgctccaagacggccccggcccagggctctgagggagcggccaccaccagcgcgtccagtcttgctaggcccgtccggccgtgggggtccgccagcccgctccccccgaggtcggccagggccgccaggagctgggcgcgaagtccggggaagcaaaaccgcgccgtccagacgggcccgacggccgcgggcgggtctaacagttggatgattttagtggcgggatgccaccgcgccaccgcctcccgcaccgcgggcaggaggcatccggctgccgccgaggccacgccgggccaggctcgcggggggaggacgaccctggcccccaccgcgggccaggcccccaggagcgcggcgtaagcggccgcggccccgcgcaccaggtcccgtgccgactcggccgtggccggcacggtgaacgtgggccaacccggaaaccccaggacggcaaagtacgggacgggtcccccccggacctcaaactcgggccccagaaaggcaaagacgggggccagggccccgggggcggcgtggaccgtggtatgccactgccggaaaagggcgacgagcgccggcgcggagaacttctcgccggcgcttacaaagtagtcgtaatcgcggggcagcagcacccgtgccgtgactcgttgcgggtgcccgcgtggccgcaggcccacctcgcacacctcgaccaggtccccgaacgcgccctccttcttgatcggcggaaacgcaagagtctggtattcgcgcgcaaatagcgcggttccggtggtgatgttaacggtcagcgaagcggcggacgcgcactggggggtgtcgcgaatggccgccaggcgcgcccacgccagccgcgcgtcgggatgctcggcaacgcgcgccgccagggccatagggtcgatgtcaatgttggcctccgcgaccaggagagcggcgcgaggggcggcgggcgggccccacgacgctctctcaactttcaccaccagtcccgtgcgtgggtccgagccgatacgcagcggggcgaacagggccaccggcccggtctggcgctccagggccgccaggacgcacgcgtacagcgcccgccacagagtcgggttctccaggggctccagcggggaggcggccggcgtcgtcgcggcgcgggcggccgccacgacggcctggacggagacgtccgcggagccgtagaaatcccgcagctccgtcgcggtgacggagacctccgcaaagcgcgcgcgaccctcccctgcggcgttgcgacatacaaaatacaccagggcgtggaagtactcgcgagcgcgggggggcagccataccgcgtaaagggtaatggcgctgacgctctcctccacccacacgatatctgcggtgtccatcgcacggcccctaaggatcacgggcggtctgtgggtcccatgctgccgtgcctggccgggcccggtgggtcgcggaaaccggtgacggggggggggcggtttttggggttggggtgggggtgggaaacggcccgggtccgggggccaacttggcccctcggtgcgttccggcaacagcgccgccggtccgcggacgaccacgtaccgaacgagtgcggtcccgagacttatagggtgctaaagttcaccgccccctgcatcatgggccaggcctcggtggggagctccgacagcgccgcctccaggatgatgtcagcgttggggttggcgctggatgagtgcgtgcgcaaacagcgcccccacgcaggcacgcgtagcttgaagcgcgcgcccgcaaactcccgcttgtgggccataagcagggcgtacagctgcctgtgggtccggcaggcgctgtggtcgatgtggtgggcgtccaacaaccccacgattgtctgtttggtgaggtttttaacgcgccccgccccgggaaacgtctgcgtgcttttggccatctgcacgccaaacagttcgccccagattatcttgaacagcgccaccgcgtggtccgtctcgctaacggacccgcgcgggggacagccgcttagggcgtcggcgacgcgcttgacggcttcctccgagagcagaagtccgtcggttacgttacagtggcccagttcgaacaccagctgcatgtagcggtcgtagtggggggtcagtaggtccagcacgtcatcggggccgaaggtcctcccagatcccccggccgccgagtcccaatgcaggcgcgcggccatggtgctgcacaggcacaacagctcccagacgggggttacgttcagggtggggggcagggccacgagctccagctctccggtgacgttgatcgtggggatgacgcccgtggcgtagtggtcatagatccgccgaaatatggcgctgctgcgggtggccatgggaacgcggagacaggcctccagcaacgccaggtaaataaaccgcgtgcgtcccatcaggctgttgaggttgcgcatgagcgcgacaatttccgccggcgcgacatcggaccggaggtatttttcgacgaaaagacccacctcctccgtctcggcggcctgggccggcagcgacgcctcgggatcccggcaccgcagctcccgtagatcgcgctgggccctgagggcgtcgaaatgtacgccccgcaaaaacagacagaagtcctttggggtcagggtatcgtcgtgtccccagaagcgcacgcgtatgcagtttagggtcagcagcatgtgaaggatgttaaggctgtccgagagacacgccagcgtgcatctctcaaagtagtgtttgtaacggaatttgttgtagatgcgcgacccccgccccagcgacgtgtcgcatgccgacgcgtcacagcgccccttgaaccggcgacacagcaggtttgtgacctgggagaactgcgcgggccactggccgcaggaactgaccacgtgattaaggagcatgggcgtaaagacgggctccgagcgcgccccggagccgtccatgtaaatcagtagctcccccttgcggagggtgcgcacccgtcccagggactggtacacggacaccatgtccggtccgtagttcatgggttttacgtaggcgaacatgccatcaaagtgcaggggatcgaagctgaggcccacggttacgaccgtcgtgtatataaccacgcggtattggccccacgtggtcacgtccccgaggggggtgagcgagtgaagcaacagcacgcggtccgtaaactgacggcagaaccgggccacgatctccgcgaaggagaccgtcgacgaaaaaatgcagatgttatcgcccccgccaaggcgcgcttccagctccccaaagaacgtggccccccgggcgtccggagaggcgtccggagacgggccgctcggcggcccgggcgggcgcagggcagcctgcaggagctcggtccccagacgcgggagaaacaggcaccggcgcgccgaaaacccgggcatggcgtactcgccgaccaccacatgcacgtttttttcgccccggagaccgcacaggaagtccaccaactgcgcgttggcggttgcgtccatggcgatgatccgaggacaggtgcgcagcaggcgtagcattaacgcatccacgcggcccagttgctgcatcgttggcgaatagagctggcccagcgtcgacataacctcgtccagaacgaggacgtcgtagttgttcagaaggttggggcccacgcgatgaaggctttccacctggacgataagtcggtggaaggggcggtcgttcataatgtaattggtggatgagaagtaggtgacaaagtcgaccaggcctgactcagcgaaccgcgtcgccagggtctgggtaaaactccgacgacaggagacgacgagcacactcgtgtccggagagtggatcgcttcccgcagccagcggatcagcgcggtagtttttcccgaccccattggcgcgcggaccacagtcacgcacctggccgtcggggcgctcgcgttggggaaggtgacgggtccgtgctgctgccgctcgatcgttgttttcgggtgaacccggggcacccattcggccaaatcccccccgtacaacatccgcgctagcgatacgctcgacgtgtactgttcgcactcgtcgtccccaatgggacgcccggcccccagaggatctcccgactccgcgccccccacgaaaggcatgaccggggcgcggacggcgtggtgggtctggtgtgtgcaggtggcgacgtttgtggtctctgcggtctgcgtcacggggctcctcgtcctggcctctgtgttccgggcacggtttccctgcttttacgccacggcgagctcttatgccggggtgaactccacggccgaggtgcgcgggggtgtagccgtgcccctcaggttggacacgcagagccttgtgggcacttatgtaatcacggccgtgttgttgttggccgcggccgtgtatgccgtggtcggcgccgtgacctcccgctacgaccgcgccctggacgcgggccgccgtctggctgcggcccgcatggccatgccgcacgccacgctgatcgccggaaacgtctgctcttggttgctgcagatcaccgtcctgttgctggcccatcgcaccagccagctggcccacctggtttacgtcctgcactttgcgtgtctggtgtattttgcggcccatttttgcaccaggggggtcctgagcgggacgtatctgcgtcaggtgcacggcctgatggagccggccccgactcatcatcgcgtcgttggcccggctcgagccgtgctgacaaacgccttgctgttgggcgtcttcctgtgcacggccgacgccgcggtatccctgaataccatcgccgcgttcaactttaatttttcggccccgggcatgctcatatgcctgaccgtgctgttcgcccttctcgtcgtatcgctgttgttggtggtcgagggggtgttgtgtcactacgtgcgcgtgttggtgggcccccacctgggggccgtggccgccacgggcatcgtcggcctggcatgcgagcactattacaccaacggctactacgttgtggagacgcagtggccgggggcccagacgggagtccgcgtcgccctcgccctggtcgccgcctttgccctcggcatggccgtgctccgctgcacccgcgcctatctgtatcacaggcggcaccacaccaaattttttatgcgcatgcgcgacacgcgacaccgcgcacattccgccctcaagcgcgtacgcagttccatgcgcggatcgcgagacggccgccacaggcccgcacccggcagcccgcccgggattcccgaatatgcggaagacccctacgcgatctcatacggcggccagctcgaccggtacggagattccgacggggagccgatttacgacgaggtggcggacgaccaaaccgacgtattgtacgccaagatacaacacccgcggcacctgcccgacgacgagcccatctatgacaccgttggggggtacgaccccgagcccgccgaggaccccgtgtacagcaccgtccgccgttggtagctgtttggttccgttttaataaaccgtttgtgtttaacccgaccgtggtgtatgtctggtgtgtggcgtccgatcccgttactatcaccgttccccccaaaccccggcgattgtgggtttttttaaaaacgacacgcgtgcgaccgtatacagaacattgttgttttttattcgctatcggacatggggggtggaaactgggtggcggggcaggcgcctccgggggttcgccggtgagtgtggcgcgaggggggatccgacgaacgcaggcgctgtctccccggggcccgcgtaaccccgcgcatatccgggggcacgtagaaattaccttcctcttcggactcgatatccacgacgtcaaagtcgtgggcggtcagcgagacgacctccccgtcgtcggtgatgaggacgttgtttcggcagcagcagggccgggtcccggagaacgagaggcccatagctcggcgagcgtgtcgtcgaacgccaggcggctgcttcgctgtatggccttatagatctccggatcgatgcggacgggggtaatgatcagggcgatcggaacggcctggttcgggagaatggacgccttgctgggtcctgcggccccgagagccccggcgccgtcctccaggcggaacgttacgccctcctccgcgctagtgcggtgcctgccgataaacgtcaccagatgcgggtggggggggcagtcggggaagtggctgtcgagcacgtagccctgcaccaagatctgcttaaagttcgggtgacgggggttcgcgaagacgggctcgcggcgtaccagatccccggagctccaggacacgggggagatggtgtggcgtccgaggtcgggggcgccaaacagaagcacctccgagacaacgccgctatttaactccaccaaggcccgatccgcggcggagcaccgccttttttcgcccgaggcgtgggcctctgaccaggcctggtcttgcgtgacgagagcctcctccgggccggggacgcgcccgggcgcgaagtatcgcacgctgggcttcgggatcgaccggataaatgcccggaacgcctccggggaccggtgtgccatcaagtcctcgtacgcggaggccgtggggtcgctggggtccatggggtcgaaagcgtacttggcccggcatttgacctcgtaaaaggccaggggggtcttggggactggggccaagtagccgtgaatgtcccgaggacagacgagaatatccagggacgccccgaccatccccgtgtgaccgtccatgaggaccccacacgtatgcacgttctcttcggcgaggtcgccgggttcgtggaagataaagcgccgcgtgtcggcgccggcctcgccgccgtcgtccgcgcggcccacgcagtagcgaaacagcaggcttcgggccgtcggctcgttcacccgcccgaacatcaccgccgaagactgtacatccggccgcaggctggcgttgtgcttcagccactggggcgagaaacacggaccctgggggccccagcggagggtggatgcggtcgtgaggccccgccggagcagggcccatagctggcagtcggcctggttttgcgtggccgcctcgtaaaaccccatgaggggccggggcgccacggcgtccgcggcggccgggggcccgcggcgcgtcaggcgccataggtgccggccgagtccgcggtccaccatacccgcctcctcgaggaccacggccagggaacacagataatccaggcgggcccagaggggaccgatggccagaggggcgcggacgccgcgcagcaacccgcgcaggtggcgctcgaacgtctcggctagtatatgggagggcagcgcgttggggatcaccgacgccgaccacatagagtcaaggtccggggagtcgggatcggcgtccgggtcgcgggcgtgggtgcccccaggagatagcggaatgtctggggtcggaggccctgaggcgtcagaaagtgccggcgacgcggcccggggcttttcgtctgcggtgtcggtggcgtgctgatcacgtggggggttaacgggcgaatgggagctcgggtccacagctgacgtcgtctggggtggggggggcaggggacggaaggtggttgttagcggaagactgttagggcgggggcgcttgggggggctgtcggggccacgaggggtgtcctcggccagggcccaggaacgcttagtcacggtgcgtcccggcggacatgctgggcctcccgtggactccatttccgagacgacgtggggggagcggtggttgagcgcgccgccgggtgaacgctgattctcacgacagcgcgtgccgcgcgcacgggttggtgtgacacaggcgggacaccagcaccaggagaggcttaagctcgggaggcagcgccaccgacgacagtatcgccttgtgtgtgtgctggtaatttatacaccgatccgtaaacgcgcgccgaatcttgggattgcggaggtggcgccggatgccctctgggacgtcatacgccaggccgtgggtgttggtctcggccgagttgacaaacagggctgggtgcagcacgcggcgataggcgagcagggccagggcgaagtccagcgacagctggttgttgaaatactggtaaccgggaaaccgggtcacgggtacgcccaggctcggggcgacgtacacgctaaccaccaactccagcagcgtctggccaagggcgtacaggtcaaccgctaacccgacgtcgtgcttcaggcggtggttggtaaattcggcccgttcgttgttaaggtatttcaccaacagctccgggggctggttatacccgtgacccaccagggtgtgaaagttggctgtggttagggcggtgggcatgccaaacatccggggggacttgaggtccggctcctggaggcaaaactgcccccgggcgatcgtggagttggagttgagggtgacgaggctaaagtcggcgaggacggcccgccggagcgagacggcgtccgaccgcagcatgacgaggatgttggcgcacttgatatccaggtggctgatcccgcaggtggtgtttaaaaacacaacggcgcgggccagctccgtgaagcactggtggagggccgtcgagaccgaggggtttgttgtgcgcagggacgccagttggccgatatacttaccgaggtccatgtcgtacgcggggaacactatctgtcgttgttgcagcgagaacccgaggggcgcgatgaagccgcggatgttgtgggtgcggccggcgcgtagagcgcactccccgaccaacagggtcgcgatgagctcaacggcaaaccactccttttcctttatggtcttaacggcaagcttatgttcgcgaatcagttggacgtcgccgtatcccccagaccccccgaagcttcgggccccggggatctcgagggtcgtgtagtgtagggcggggttgatggcgaacacggggctgcatagcttgcggatgcgcgtgagggtaaggatgtgcgagggggacgaggggggtgcggttaacgccgcctgggatctgcgcaggggcgggcggttcagtttggccgccgtaccgggcgtctcgggggacgcgcggcgatgagacgagcggctcattcgccatcgggatagtcccgcgcgaagccgctcgcggaggccggatcggtggcgggacccgtgggaggagcgggagccggcggcgtcctggagagaggggccgctggggcgcccggaggccccgtgtgggttggagtgtatgtaggatgcgagccaatccttgaaggactgttggcgtgcaccttgggggctgaggttagctgccacatgaccagcaggtcgctgtctgcgggactcatccatccttcggccaggtcgccgtcttcccacagagaagcgttggtcgctgcttcctcgagttgctcctcctggtccgcaagacgatcgtccacggcgtccaggcgctcaccaagcgccggatcgaggtaccgtcggtgtgcggttagaaagtcacgacgcgccgcttgctcctccacgcgaattttaacacaggtcgcgcgctgtcgcatcatctctaagcgcgcgcgggactttagccgcgcctccaattccaagtgggccgcctttgcagccataaaggcgccaacaaaccgaggatcttgggtgctgacgccctcccggtgcagctgcagggtctggtccttgtaaatctcggctcggaggtgcgtctcggccaggcgtcggcgcagggccgcgtgggcggcatctcggtccattccgccaccctgcgggcgacccggggggtgctctgatagtctcgcgtgcccaaggcccgtgatcggggtacttcgccgccgcgacccgccacccggtgtgcgcgatgtttggtcagcagctggcgtccgacgtccagcagtacctggagcgcctcgagaaacagaggcaacttaaggtgggcgcggacgaggcgtcggcgggcctcacaatgggcggcgatgccctacgagtgccctttttagatttcgcgaccgcgacccccaagcgccaccagaccgtggtcccgggcgtcgggacgctccacgactgctgcgagcactcgccgctcttctcggccgtggcgcggcggctgctgtttaatagcctggtgccggcgcaactaaaggggcgtgatttcgggggcgaccacacggccaagctggaattcctggcccccgagttggtacgggcggtggcgcgactgcggtttaaggagtgcgcgccggcggacgtggtgcctcagcgtaacgcctactatagcgttctgaacacgtttcaggccctccaccgctccgaagcctttcgccagctggtgcactttgtgcgggactttgcccagctgcttaaaacctccttccgggcctccagcctcacggagaccacgggccccccaaaaaaacgggccaaggtggacgtggccacccacggccggacgtacggcacgctggagctgttccaaaaaatgatccttatgcacgccacctactttctggccgccgtgctcctcggggaccacgcggagcaggtcaacacgttcctgcgtctcgtgtttgagatccccctgtttagcgacgcggccgtgcgccacttccgccagcgcgccaccgtgtttctcgtcccccggcgccacggcaagacctggtttctagtgcccctcatcgcgctgtcgctggcctcctttcgggggatcaagatcggctacacggcgcacatccgcaaggcgaccgagccggtgtttgaggagatcgacgcctgcctgcggggctggttcggttcggcccgagtggaccacgttaaaggggaaaccatctccttctcgtttccggacgggtcgcgcagtaccatcgtgtttgcctccagccacaacacaaacgtaagtcctcttttctttcgcatggctctcccaaggggccccgggtcgacccgacccacacccacccacccacccacatacacacacaaccagacgcgggaggaaagtctgccccgtgggcactgatttttattcgggatcgcttgaggaggcccgggcaacggcccgggcaacggtggggcaactcgtagcaaataggcgactgatgtacgaagagaagacacacaggcgccacccggcgctggtcggggggatgttgtccgcgccgcaccgtcccccgacgacctcttgcagacggtccgtgatgcaaggacggcggggggcctgcagcagggtgaccgtatccacgggatggccaaagagaagcggacacaggctagcatccccctggaccgccagggtacactgggccatcttggcccacagacacggggcgacgcagggacaggactccgttacgacggaggagagccacagtgcgttggcggaatcgatgtggggcggcggggcgcaggactcgcagccccccgggtggttggtgatcctggccaggagccatcccagatggcgggccctgcttcccggtggacagagcgaccccaggtcgctgtccatggcccagcagtagatctggccgctggggaggtgccaccaggcccccgggcccaaggcgcaacacgcgcccggctccgggggggtcttcgcggggaccagatacgcgccatccagctcgccgaccactggctcctccgcgagctgttcggtggttgggtcgggggtttcctccgggggggtggccgcccgtatgcgggcgaacgtgagggtgcacaggagcggggtcagggggtgcgtcacgctccggaggtggacgatcgcgcagtagcggcgctcgcggttaaagaaaaagagggcaaagaaggtgttcgggggcaaccgcagcgccttggggcgcgtcagatacagaaaaatctcgcagaagagggcgcgcccggggtctgggttaggaagggccacctgacacagaggctcggtgaggaccgttagacaccgaaagatcttgagccgctcgtccgcccgaacgacgcgccacacaaagacggagttgacaatgcgcgcgatagagtcgacgtccgtccccaggtcgtcgactctgtcgcgcgtgccgcgagctccggcccgggaatccggccggggcaaggtccccgggggaccaggcggcgccaggggccgccggggtcccagctgcgccatgccgggggcggggggagggcaaaccccagaggcgggggccaacggcgcggggaggagtgggtgggcgaggtggccgggggaaggcgcccgctagcgagaacggccgttcccggacgacaccttgcgacaaaacctaaggacagcggcccgcgcgacggggtccgagaggctaaggtaggccgcgatgttaatggtgaacgcaaagccgccgggaaagacaactatgccacagaggcggcgattaaaccccaggcagaggtaggcgtagctttccccgggcaggtattgctcgcagaccctgcgtggggctgtggaggggacggcctccatgaagcgacatttactctgctcgcgtttactgacgtcaccatccatcgccacggcgattggacgattgttaagccgcagcgtgtctccgcttgtgctgtagtagtcaaaaacgtaatggccgtcggagtcggcaaagcgggccgggaggtcgtcgccgagcgggacgacccgccgcccccgaccgccccgtccccccaggtgtgccaggacggccagggcatacgcggtgtgaaaaaaggcgtcgggggcggtcccctcgacggcgcgcatcaggttctcgaggagaatggggaagcgcctggtcacctcccccagccacgcgcgttggtcggggccaaagtcatagcgcaggcgctgtgagattcgagggccgccctgaagcgcggcccggatggcctggcccagggcccggaggcacgccagatgtatgcgcgcagtaaaggcgacctcggcggcgatgtcaaagggcggcaggacggggcgcgggtggcgcaggggcacctcgagcgcgggaaagcggagcagcagctccgcctgcccagcgggagacagctggtgggggcgcacgacgcgttctgcggcgcaggcctcggtcagggccgtggccagcgccgaggacagcagcggagggcgggcgcgtcgcccgccccacgccacggagttctcgtaggagacgacgacgaagcgctgcttggttccgtagtggtggcgcaggaccacggagatagaacgacggctccacagccagtccggccggtcgccgccggccagggcttcccatccgcgatccaaccactcgaccagcgaccgcggctttgcggtaccaggggtcagggttagaacgtcgttcaggatgtcctcgcccccgggcccgtggggcactggggccacaaagcggcccccgcctgggggctccagacccgccaacaccgcatctgcgtcagccgcccccatggcgcccccgctgacggcctggtgaaccagggcgccctggcggagccccgatgcaacgccacaggccgcacgcccggtccgagcgcggaccgggtggcggcgggtgacgtcctgcactgcccgctgaaccaacgcgaggatctcctcgttctcctgcgcgatggacacgtcctgggccgcggtcgtgtcgccgccgggggccgtcagctgctcctccggggagatgggggggtcggacgccccgacgatgggcgggtctgcgggcgcccccgcgtggggccgggccaagggctgcggacgcggggacgcgctttcccccagacccatggacaggtgggccgcagcctccttcgcggccggcggggcggcggcgccaagcagagcgacgtagcggcacaaatgccgacagacgcgcatgatgcgcgtgctgtcggccgcgtagcgcgtgttgggggggacgagctcgtcgtaactaaacagaatcacgcgggcacagctcgcccccgagccccacgcaaggcgcagcgccgccacggcgtacgggtcatagacgccctgtgcgtcacacaccacgggcaaggagacgaacaaccccccggcgctggacgcacgcggaaggaggccagggtgtgccggcacgacgggggccagaagctcccccaccgcatccgcgggcacgtaggcggcaaacgccgtgcaccacggggtacagtcgccggtggcatgagcccgagtctggatttcgacctggaagtttgcggccgtcccgagtccggggcggccgcgcatcagggcggccagagggattcccgcggccgccaggcactcgctggatatgatgacgtgaaccaaagacgagggccgacccgggacgtggccgagatcgtactggacctcgttggccaagtgcgcgttcatggttcgggggtgggtgtgggtgtgtaggcgatgcgggtcccccgagtccgcgggaagggcgcgggtttggcgcgcgtatgcgtattcgccaacggaggcgtgcgtgcttatgcgcggcgcgtttcttctgtctccagggaatccgaggccaggactttaacctgctctttgtcgacgaggccaactttattcgcccggatgcggtccagacgattatgggctttctcaaccaggccaactgcaagattatcttcgtgtcgtccaccaacaccgggaaggccagtacgagctttttgtacaacctccgcggggccgccgacgagcttctcaacgtggtgacctatatatgcgatgatcacatgccgcgggtggtgacgcacacaaacgccacggcctgttcttgttatatcctcaacaagcccgttttcatcacgatggacggggcggttcgccggaccgccgatttgtttctggccgattccttcatgcaggagatcatcgggggccaggccagggagaccggcgacgaccggcccgttctgaccaagtctgcgggggagcggtttctgttgtaccgcccctcgaccaccaccaacagcggcctcatggcccccgatttgtacgtgtacgtggatcccgcgttcacggccaacacccgagcctccgggaccggcgtcgctgtcgtcgggcggtaccgcgacgattatatcatcttcgccctggagcacttttttctccgcgcgctcacgggctcggcccccgccgacatcgcccgctgcgtcgtccacagtctgacgcaggtcctggccctgcatcccggggcgtttcgcggcgtccgggtggcggtcgagggaaatagcagccaggactcggccgtcgccatcgccacgcacgtgcacacagagatgcaccgcctactggcctcggagggggccgacgcgggctcgggccccgagcttctcttctaccactgcgagcctcccgggagcgcggtgctgtacccctttttcctgctcaacaaacagaagacgcccgcctttgaacactttattaaaaagtttaactccgggggcgtcatggcctcccaggagatcgtttccgcgacggtgcgcctgcagaccgacccggtcgagtatctgctcgagcagctgaataacctcaccgaaaccgtctcccccaacacggacgtccgtacgtattccggaaaacggaacggcgcctcggatgaccttatggtcgccgtcattatggccatctaccttgcggcccaggccggacctccgcacacattcgctcccatcacacgcgtttcgtgagcgcccaataaacacacccaggtatgctacgcacgaccacggtgtcgcctgttaagggggggggaagggggtgttggcgggaagcgtgggaacacgggggattctctcacgaccggcaccagtaccacccccctgtgaacacagaaaccccaacccaaatcccataaacatacgacacacaggcatattttggaatttcttaggtttttatttatttaggtatgctggggtttctccctggatgcccacccccccccccccccgtgggtctagccgggccttagggatagcgtataacgggggccatgtctccggaccgcacaacggccgcgccgtcaaaggtgcacacccgaaccacgggagccagggccaaggtgtctcctagttggcccgcgtgggtcagccaggcgacgagcgcctcgtagagcggcagccttcgctctccatcctgcatcagggccggggcttcggggtgaatgagctgggcggcctcccgcgtgacactctgcatctgcaggagagcgttcacgtacccgtcctgggcacttagcgcaaagagccgggggattagcgtaaggatgatggtggttccctccgtgatcgagtaaaccatgttaaggaccagcgatcgcagctcggcgtttacggggccgagttgttggacgtccgccagcagcgagaggcgactcccgttgtagtacagcacgttgaggtctggcagccctccggggtttctggggctggggttcaggtcccggatgcccctggccacgagccgcgccacgatttcgcgcgccaggggcgatggaagcggaacgggaaaccgcaacgtgaggtccagcgaatccaggcgcacgtccgtcgcttggccctcgaacacgggcgggacgaggctgatggggtccccgttacagagatctacgggggaggtgttgcgaaggttaacggtgccggcgtgggtgaggcccacgtccagggggcaggcgacgattcgcgtgggaagcacccgggtgatgaccgcggggaagcgccttcggtacgccagcaacagccccaacgtgtcgggactgacgcctccggagacgaaggattcgtgcgccacgtcggccagcgtcagttgccggcggatggtcggcaggaataccacccgcccttcgcagcgctgcagcgccgccgcatcggggcgcgagatgcccgagggtatcgcgatgtcagtttcaaagccgtccgccagcatggcgccgatccacgcggcagggagtgcagtggtggttcgggtggcgggaggagcgcggtgggggtcagcggcgtagcagagacgggcgaccaacctcgcataggacggggggtgggtcttagggggttgggaggcgacagggaccccagagcatgcgcggggaggtctgtcgggcccagacgcaccgagagcgaatccgtccatggagtcccggcctgggttttatggggcccggccctcggaatcgcggcttgtcggcggggacaaagggggcggggctagggggcttgcggaaacagaagacgtgtgggataaaagaatcgcactaccccaaggaagggcggggcggtttattacagagccagtcccttgagcggggatgcgtcatagacgagatactgcgcgaagtgggtctcccgcgcgtgggcttccccgttgcgggcgctgcggaggagggcggggtcgctggcgcaggtgagcgggtaggcctcctgaaacaggccacacgggtcctccacgagttcgcggcaccccggggggcgcttaaactgtacgtcgctggcggcggtggccgtggacaccgccgaacccgtctccacgatcaggcgctccaggcagcgatgtttggcggcgatgtcggccgacgtaaagaacttaaagcaggggctgagcaccggcgaggccccgttgaggtggtaggccccgttatagagcaggtccccgtacgaaaatcgctgcgacgcccacgggttggccgtggccgcgaaggcccgggacgggtcgctctggccgtggtcgtacatgagggcggtgacatccccctccttgtcccccgcgtaaacgcccccggcggcgcgtccccgggggttgcagggccggcggaagtagttgacgtcggtcgacacgggggtggcgataaactcacacacggcgtcctggccgtggtccatccctgcgcgccgcggcacctgggcgcacccgaacacggggacgggctgggccggccccaggcggtttcccgccacgaccgcgttccgcaggtacacggctgccgcgttgtccagtagagggggagccccgcggcccaggtaaaagttttggggaaggttgcccatgtcggtgacggggttgcggacggttgccgtggccacgacggcggtgtagcccacgcccaggtccacgttcccgcgcggctgggtgagcgtgaagtttacccccccgccagtttcatgccgggccacctggagctggcccaggaagtacgcctccgacgcgcgctccgagaacagcacgttctcagtcacaaagcggtcctgtcggacgacggtgaacccaaacccgggatggaggcccgtcttgagctgatgatgcaaggccacgggactgatcttgaagtaccccgccatgagcgcgtaggtcagcgcgttctccccggccgcgctctcgcggacgtgctgcacgacgggctgtcggatcgacgaaaagtagttggcccccagagccggggggaccagggggacctgccgcgacaggtcgcgcagggccggggggaaattgggcgcgttcgccacgtggtcggccccggcgaacagcgcgtggacggggagggggtaaaaatagtcgccattttggatggtatggtccagatgctggggggccatcagcaggattccggcgtgcaacgccccgtcgaatatgcgcatgttggtggtggacgcggtgttggcgcccgcgtcgggcgccgccgagcagagcagcgccgttgtgcgttcggccatgttgtgggccagcacctgcagcgtgagcatggcgggcccgtccactaccacgcgcccgttgtgaaacatggcgttgaccgtgttggccaccagattggccgggtgcagggggtgcgcggggtccgtcacggggtcgctggggcaatcctcgccgggggtgatctccgggaccaccatgttctgcagggtggcgtatacgcggtcgaagcgaacccccgcggtgcagcagcggccccgcgagaaggcgggcaccatcacgtagtagtaaatcttgtggtgcacggtccagtccgccccccggtgcggccggtcgtccgcggcgtccgcggctcgggcctgggtgttgtgcagcagctggccgtcgttgcggttgaagtccgcggtcgccacgttacacgccgctgcgtacacggggtcgtggccccccgcgctaacccggcagtcgcgatggcggtccagggccgcgcgccgcatcagggcgtcgcagtcccacacgaggggtggcagcagcgccgggtctcgcattaggtgattcagttcggcttgcgcctgcccgcccagttccgggccggtcagggtaaagtcatcaaccagctgggccagggcctcgacgtgcgccaccaggtcccggtacacggccatgcactcctcgggaaggtctcccccgaggtaggtcacgacgtacgagaccagcgagtagtcgttcacgaacgccgcgcaccgcgtgttgttccagtagctggtgatgcactggaccacgagccgggccagggcgcagaagacgtgctcgctgccgtgtatggcggcctgcagcaggtaaaacaccgccgggtagttgcggtcttcgaacgccccgcgaacggcggcgatggtggcgggggccatggcgtggcgtcccacccccagctccaggccccgggcgtcccggaacgccgccggacatagcgccaggggcaagttgccgttcaccacgcgccaggtggcctggatctcccccgggccggccgggggaacgtccccccccggcagctccacgtcggccacccccacgaagaagtcgaacgcggggtgcagctcaagagccaggttggcgttgtcgggctgcataaactgctccggggtcatctggccttccgcgacccatcggacccgcccgtgggccaggcgctgcccccaggcgttcaaaaacagctgctgcatgtctgcggcggggccggccggggccgccacgtacgccccgtacggattggcggcttcgacggggtcgcggttaaggcccccgaccgccgcgtcaacgttcatcagcgaagggtggcacacggtcccgatcgcgtgttccagagacaggcgcagcacctggcggtccttcccccaaaaaaacagctggcggggcgggaaggcgcggggatccgggtggccgggggcggggactaggtccccggcgtgcgcggcaaaccgttccatgaccggattgaacaggcccaggggcaggacgaacgtcaggtccatggcgcccaccagggggtagggaacgttggtggcggcgtagatgcgcttctccagggcctccaaaaagatcagcttctcgccgatggacaccagatccgcgcgcacgcgcgtcgtctggggggcgctctcgagctcgtccagcgtctgccggttcaggtcgagctgctcctcctgcatctccagcaggtggcggcccacgtcgtccagacttcgcacggccttgcccatcacgagcgccgtgaccaggttggccccgttcaggaccatctcgccgtacgtcaccggcacgtcggcttcggtgtcctccactttcaggaaggactgcaggaggcgctgtttgatcggggcggtggtgacgagcaccccgtcgaccggacgcccgcgcgtgtcggcatgcgtcagacggggcacggccacggagggctgcgtggccgtggtgaggtccacgagccaggcctcgacggcctcccggcggtggcccgccttgcccaggaaaaagctcgtctcgcagaagcttcgctttagctcggcgaccagggtcgcccgggccaccctggtggccaggcggccgttgtccaggtatcgttgcatcggcaacaacaaagccaggggcggcgccttttccagcagcacgtgcagcatctggtcggccgtgccgcgctcaaacgccccgaggacggcctggacgttgcgagcgagctgttggatggcgcgcaactggcgatgcgcgctgatacccgtcccgtccagggcctcccccgtgagcagggcgatggcctcggtggccaggctgaaggcggcgttcagggcccggcggtcgataatcttggtcatgtaattgtgtgtgggttgctcgatggggtgcgggccgtcgcgggcaatcagcggctggtggacctcgaactgtacgcgcccctcgttcatgtaggccagctccggaaacttggtacacacgcacgccaccgacaacccgagctccagaaagcgcacgagcgacagggtgttgcaatacgaccccaacagggcgtcgaactcgacgtcatacaggctgtttgcatcggagcgcacgcgggaaaaaaaatcgaacaggcgtcgatgcgacgccacctcgatcgtgctaaggagggacccggtcggcaccatggccgcggcataccggtatcccggagggtcgcggttgggagcggccatggggtcgcgtggagatcggctgtctctagcgatattggcccggggaggctaagatccaccccaacgcccggccacccgtgtacgtgcccgacggcccaaggtccaccgaaagacacgacgggcccggacccaaaaaggcgggggatgctgtgtgagaggccgggtgtcggtcgggggggaaaggcaccgggagaaggctgcggcctcgttccaggagaacccagtgtccccaacagacccggggacgtgggatcccaggccttatataccccccccgccccacccccgttagaacgcgacgggtgcattcaagatggccctggtccaaaagcgtgccaggaagaaattggcagaggcggcaaagctgtccgccgccgccacccacatcgaggccccggccgcgcaggctatccccagggcccgtgtgcgcaggggatcggtgggcggcagcatttggttggtggcgataaagtggaaaagcccgtccggactgaaggtctcgtgggcggcggcgaacaaggcacacagggccgtgcctcccaaaaacacggacatcccccaaaacacgggcgccgacaacggcagacgatccctcttgatgttaacgtacaggaggagcgcccgcaccgcccacgtaacgtagtagccgacgatggcggccaggatacaggccggcgccaccacccttccggtcagcccgtaatacatgcccgctgccaccatctccaacggcttcaggaccaaaaacgaccaaaggaacagaatcacgcgctttgaaaagaccggctgggtatggggcggaagacgcgagtatgccgaactgacaaaaaagtcagaggtgccgtacgaggacaatgaaaactgttcctccagtggcagttctccctcctcccccccaaaggcggcctcgtcgaccagatctcgatccaccagaggaaggtcatcccgcatggtcatggggtgtgcggtggaggtggggagaccgaaaccgcaaagggtcgcttacgtcagcaggatcccgagatcaaagacacccgggttcttgcacaaacaccacccgggttgcatccgcggaggcgagtgttttgataaggccgttccgcgccttgatataacctttgatgttgaccacaaaacccggaatttacgcctacgccccaatgcccacgcaagatgaggtaggtaaccccccccccgtgggtgtgacgttgcgtttagttcattggaggccaaggggaaaatggggtggggaggaaacggaaaacccagtaggccgtgttgggaacacgcccggggttgtcctcaaaaggcagggtccatactacggaagccgtcgttgtattcgagacctgcctgtgcgacgcacgtcggggttgcctgtgtccggttcggccccaccgcgtgcggcacgcacgaggacgagtccgcgtgctttattggcgttccaagcgttgccctccagtttctgttgtcggtgttcccccatacccacgcccacatccaccgtagggggcctctgggccgtgtcacgtcgccgcccgcgatggagcttagctacgccaccaccatgcactaccgggacgttgtgttttacgtcacaacggaccgaaaccgggcctactttgtgtgcggggggtgtgtttattccgtggggcggccgtgtgcctcgcagcccggggagattgccaagtttggtctggtcgttcgagggacaggcccagacgaccgcgtggtcgccaactatgtacgaagcgagctccgacaacgcggcctgcaggacgtgcgtcccattggggaggacgaggtgtttctggacagcgtgtgtcttctaaacccgaacgtgagctccgagctggatgtgattaacacgaacgacgtggaagtgctggacgaatgtctggccgagtactgcacctcgctgcgaaccagcccgggtgtgctaatatccgggctgcgcgtgcgggcgcaggacagaatcatcgagttgtttgaacacccaacgatagtcaacgtttcctcgcactttgtgtataccccgtccccatacgtgttcgccctggcccaggcgcacctcccccggctcccgagctcgctggaggccctggtgagcggcctgtttgacggcatccccgccccacgccagccacttgacgcccacaacccgcgcacggatgtggttatcacgggccgccgcgccccacgacccatcgccgggtcgggggcggggtcggggggcgcgggcgccaagcgggccaccgtcagcgagttcgtgcaagtcaaacacattgaccgcgtgggccccgctggcgtttcgccggcgcctccgccaaacaacaccgactcaagttccctggtgcccggggcccaggattccgccccgcccggccccacgctaagggagctgtggtgggtgttttatgccgcagaccgggcgctggaggagccccgcgccgactctggcctcacccgcgaggaggtacgtgccgtacgtgggttccgggagcaggcgtggaaactgtttggctccgcgggggccccgcgggcgtttatcggggccgcgttgggcctgagccccctccaaaagctagccgtttactactatatcatccaccgagagaggcgcctgtcccccttccccgcgctagtccggctcgtaggccggtacacacagcgccacggcctgtacgtccctcggcccgacgacccagtcttggccgatgccatcaacgggctgtttcgcgacgcgctggcggccggaaccacagccgagcagctcctcatgttcgaccttctccccccaaaggacgtgccggtgggaagcgacgtgcaggccgacagcaccgctctgctgcgctttatagaatcgcaacgtctcgccgtccccgggggggtgatctcccccgagcacgtcgcgtaccttggtgcgttcctgagcgtgctgtacgctggccgcgggcgcatgtccgcagccacgcacaccgcgcggctgacaggggtgacctccctggtgctagcggtgggtgacgtggaccgtctttccgcgtttgaccgcggagcggcgggcgcggccagccgcacgcgggccgccgggtacctggatgtgcttcttaccgttcgtctcgctcgctcccaacacggacagtctgtgtaacagaccccaataaacgtatgtcgctaccacacccttgtgtgtcaatggacgcctctccgggggggaagggaaaacaaagaggggctgggggagcggcaccaccggggcctgaacaaacaaaccacagacacggttacagtttattcggtcgggcggagaaacggccgaagccacgccccctttattcgcgtctccaaaaaaacgggacacttgtccggagaacctttaggatgccagccagggcggcggtaatcataaccacgcccagcgcagaggcggccagaaacccgggcgcaattgcggccacgggctgcgtgtcaaaggctagcaaatgaatgacggttccgtttggaaatagcaacaaggccgtggacggcacgtcgctcgaaaacacgcttggggcgccctccgtcggcccggcggcgatttgctgctgtgtgttgtccgtatccaccagcaacacagacatgacctccccggccggggtgtagcgcataaacacggcccccacgagccccaggtcgcgctggttttgggtgcgcaccagccgcttggactcgatatcccgggtggagccttcgcatgtcgcggtgaggtaggttaggaacagtgggcgtcggacgtcgacgccggtgagcttgtagccgatcccccggggcagaggggagtgggtgacgacgtagctggcgttgtgggtgatgggtaccaggatccgtggctcgacgttggcagactgccccccgcaccgatgtgaggcctcagggacgaaggcgcggatcagggcgttgtagtgtgcccagcgcgtcagggtcgaggcgaggccgtgggtctgctgggccaggacttcgaccggggtctcggatcgggtggcttgagccagcgcgtccaggataaacacgctctcgtctagatcaaagcgcagggaggccgcgcatggcgaaaagtggtccggaagccaaaagagggttttctggtggtcggcccgggccagcgcggtccggaggtcggcgttggtcgctgcggcgacgtcggacgtacacagggccgaggctatcagaaggctccggcgggcgcgttcccgctgcaccgccgaggggacgcccgccaagaacggctgccggaggacagccgaggcgtaaaatagcgcccggtggacgaccggggtggtcagcacgcggccccctagaaactcggcatacagggcgtcgatgagatgggctgcgctgggcgccactgcgtcgtacgccgaggggctatccagcacgaaggccagctgatagcccagcgcgtgtaatgccaagctctgttcgcgctccagaatctcggccaccaggtgctggagccgagcctctagctgcaggcgggccgtgggatccaagactgacacattaaaaaacacagaatccgcggcacagcccgcggccccgcgggcggccaacccggcaagcgcgcgcgagtgggccaaaaagcctagcaggtcggagaggcagaccgcgccgtttgcgtgggcggcgttcacgaaagcaaaacccgacgtcgcgagcagccccgttaggcgccagaagagagggggacgcgggccctgctcggcgcccgcgtcccccgagaaaaactccgcgtatgcccgcgacaggaactgggcgtagttcgtgccctcctccgggtagccgcccacgcggcggagggcgtccagcgcggagccgttgtcggcccgcgtcagggaccctaggacaaagacccgataccgggggccgcccgggggcccgggaagagcccccggggggttttcgtccgcggggtccccgacccgatctagcgtctggcccgcggggaccaccatcacttccaccggagggctgtcgtgcatggatatcacgagccccatgaattcccgcccgtagcgcgcgcgcaccagcgcggcatcgcacccgagcaccagctcccccgtcgtccagatgcccacgggccacgtcgaggccgacggggagaaatacacgtacctacctggggatctcaacaggccccgggtggccaaccaggtcgtggacgcgttgtgcaggtgcgtgatgtccagctccgtcgtcgggtgccgccgggccccaaccggcggtcgggggggcggtgtatcacgcggcccgctcgggtggctcgccgtcgccacgttgtctccccgcgggaacgtcagggcctcggggtcagggacggccgaaaacgttacccaggcccgggaacgcagcaacacggaggcggttggattgtgcaagagacccttaaggggggcgaccgcggggggaggctgggcggtcggctcgaccgtgatgggggcgggcaggctcgcgttcgggggccggccgagcaggtaggtcttcgagatgtaaagcagctggccggggtcccgcggaaactcggccgtggtgaccaatacaaaacaaaagcgctcctcgtaccagcgaagaaggggcagagatgccgtagtcaggtttagttcgtccggcggcgccagaaatccgcgcggtggtttttgggggtcgggggtgtttggcagccacagacgcccggtgttcgtgtcgcgccagtacatgcggtccatgcccaggccatccaaaaaccatgggtctgtctgctcagtccagtcgtggacctgaccccacgcaacgcccaaaagaataacccccacgaaccataaaccattccccatgggggaccccgtccctaacccacggggcccgtggctatggcagggcttgccgccccgacgttggctgcgagccctgggccttcacccgaacttgggggttggggtggggaaaaggaagaaacgcgggcgtattggccccaatggggtctcggtggggtatcgacagagtgccagccctgggaccgaaccccgcgtttatgaacaaacgacccaacacccgtgcgttttattctgtctttttatttccgtcatagcgcgggttccttccggtattgtctccttccgtgtttcagttagcctcccccatctcccgggcaaacgtgcgcgccaggtcgcagatcgtcggtatggagcctggggtggtgacgtgggtctggaccatcccggaggtaagttgcagcagggcgtcccggcagccggcgggcgattggtcgtaatccaggataaagacgtgcatgggacggaggcgtttggccaagacgtccaaggcccaggcaaacacgttatacaggtcgccgttgggggccagcaactcgggggcccgaaacagggtaaataacgtgtccccgatatggggtcgtgggcccgcgttgctctggggctcggcaccctggggcggcacggccgtccccgaaagctgtccccaatcctcccgccacgacccgccgccctgcagataccgcaccgtattggcaagcagcccgtaaacgcggcgaatcgcggccaacatagccaggtcaagccgctcgccggggcgctggcgtttggccaggcggtcgatgtgtctgtcctccggaagggcccccaacacgatgtttgtgccgggcaaggtcggcgggatgagggccacgaacgccagcacggcctggggggtcatgctgcccataaggtatcgcgcggccgggtagcacaggagggcggcgatgggatggcggtcgaagatgagggtgagggccgggggcggggcatgtgagctcccagcctcccccccgatatgaggagccagaacggcgtcggtcacggcataaggcatgcccattgttatctgggcgcttgtcattaccaccgccgcgtccccggccgatatctcaccctggtcgaggcggtgttgtgtggtgtagatgttcgcgattgtctcggaagcccccagcacctgccagtaagtcatcggctcgggtacgtagacgatatcgtcgcgcgaacccagggccaccagcagttgcgtggtggtggttttccccatcccgtgaggaccgtctatataaacccgcagtagcgtgggcattttctgctccaggcggacttccgtggcttcttgctgccggcgagggcgcaacgccgtacgtcggttgctatggccgcgagaacgcgcagcctggtcgaacgcagacgcgtgttgatggcaggggtacgaagccatacgcgcttctacaaggcgcttgccaaagaggtgcgggagtttcacgccaccaagatctgcggcacgctgttgacgctgttaagcgggtcgctgcagggtcgctcggtgttcgaggccacacgcgtcaccttaatatgcgaagtggacctgggaccgcgccgccccgactgcatctgcgtgttcgaattcgccaatgacaagacgctgggcggggtttgtgtcatcatagaactaaagacatgcaaatatatttcttccggggacaccgccagcaaacgcgagcaacgggccacggggatgaagcagctgcgccactccctgaagctcctgcagtccctcgcgcctccgggtgacaagatagtgtacctgtgccccgtcctggtgtttgtcgcccaacggacgctccgcgtcagccgcgtgacccggctcgtcccgcagaaggtctccggtaatatcaccgcagtcgtgcggatgctccagagcctgtccacgtatacggtccccatggagcctaggacccagcgagcccgtcgccgccgcggcggcgctgcccgggggtctgcgagcagaccgaaaaggtcacactctggggcgcgcgacccgcccgagccagcggcccgccaggtaccacccgccgaccaaacccccgcctccacggagggcgggggggtgcttaagaggatcgcggcgctcttctgcgtgcccgtggccaccaagaccaaaccccgagctgcctccgaatgagagtgtttcgttccttccccctccccccgcgtcagacaaaccctaaccaccgcttaagcggcccccgcgaggtccgaagactcatttggatccggcgggagccacctgacaacagcccccgggtttccccacgccagacgccggtccgctgtgccatcgctccccttcatcccacccccatcttgtccccaaataaaacaaggtctggtagttaggacaacgaccgcagttctcgtgtgttattgtcgctctccgcctctcgcagatggacccgtattgcccatttgacgctctggacgtctgggaacacaggcgcttcatagtcgccgattcccgaaacttcatcacccccgagttcccccgggacttttggatgtcgcccgtctttaacctcccccgggagacggcggcggagcaggtggtcgtcctgcaggcccagcgcacagcggctgccgctgccctggagaacgccgccatgcaggcggccgagctccccgtcgatatcgagcgccggttacgcccgatcgaacggaacgtgcacgagatcgcaggcgccctggaggcgctggagacggcggcggccgccgccgaagaggcggatgccgcgcgcggggatgagccggcgggtgggggcgacgggggggcgcccccgggtctggccgtcgcggagatggaggtccagatcgtgcgcaacgacccgccgctacgatacgacaccaacctccccgtggatctgctacatatggtgtacgcgggccgcggggcgaccggctcgtcgggggtggtgttcgggacctggtaccgcactatccaggaccgcaccatcacggactttcccctgaccacccgcagtgccgactttcgggacggccggatgtccaagaccttcatgacggcgctggtcctgtccctgcagtcgtgcggccggctgtatgtgggccagcgccactattccgccttcgagtgcgccgtgttgtgtctctacctgctgtaccgaaacacgcacggggccgccgacgatagcgaccgcgctccggtcacgttcggggatctgctgggccggctgccccgctacctggcgtgcctggccgcggtgatcgggaccgagggcggccggccacagtaccgctaccgcgacgacaagctccccaagacgcagttcgcggccggcgggggccgctacgaacacggagcgctggcgtcgcacatcgtgatcgccacgctgatgcaccacggggtgctcccggcggccccgggggacgtcccccgggacgcgagcacccacgttaaccccgacggcgtggcgcaccacgacgacataaaccgcgccgccgccgcgttcctcagccggggccacaacctattcctgtgggaggaccagactctgctgcgggcaaccgcgaacaccataacggccctgggcgttatccagcggctcctcgcgaacggcaacgtgtacgcggaccgcctcaacaaccgcctgcagctgggcatgctgatccccggagccgtcccttcggaggccatcgcccgtggggcctccgggtccgactcgggggccatcaagagcggagacaacaatctggaggcgctatgtgccaattacgtgcttccgctgtaccgggccgacccggcggtcgagctgacccagctgtttcccggcctggccgccctgtgtcttgacgcccaggcggggcggccggtcgggtcgacgcggcgggtggtggatatgtcatcgggggcccgccaggcggcgctggtgcgcctcaccgccctggaactcatcaaccgcacccgcacaaaccccacccccgtgggggaggttatccacgcccacgacgccctggcgatccaatacgaacaggggcttggcctgctggcgcagcaggcacgcattggcttgggctccaacaccaagcgtttctccgcgttcaacgttagcagcgactacgacatgttgtactttttatgtctggggttcattccacagtacctgtcggcggtttagtgggtggtgggcgaggggggagggggcattagggagaaagaacaagagcctccgttgggttttctttgtgcctgtactcaaaaggtcataccccgtaaacggcgggctccagtcccggcccggcggttggcgtgaacgcaacggcgggagctgggttagcgtttagtttagcattcgctctcgcctttccgcccgcccccgaccgttgagcctttttttttttcgtccaccaaagtctctgtgggtgcgcgcatggcagccgatgccccgggagaccggatggaggagcccctgccagacagggccgtgcccatttacgtggctgggtttttggccctgtatgacagcggggactcgggcgagttggcattggatccggatacggtgcgggcggccctgcctccggataacccactcccgattaacgtggaccaccgcgctggctgcgaggtggggcgggtgctggccgtggtcgacgacccccgcgggccgttttttgtgggactgatcgcctgcgtgcaactggagcgcgtcctcgagacggccgccagcgctgcgattttcgagcgccgcgggccgccgctctcccgggaggagcgcctgttgtacctgatcaccaactacctgccctcggtctccctggccacaaaacgcctggggggcgaggcgcaccccgatcgcacgctgttcgcgcacgtagcgctgtgcgcgatcgggcggcgccttggcactatcgtcacctacgacaccggtctcgacgccgccatcgcgccctttcgccacctgtcgccggcgtctcgcgagggggcgcggcgactggccgccgaggccgagctcgcgctatccggacgcacctgggcgcccggcgtggaggcgctgacccacacgctgctttccaccgccgttaacaacatgatgctgcgggaccgctggagcctggtggccgagcggcggcggcaggccgggatcgccggacacacctacctccaggcgagcgaaaaattcaaaatgtggggggcggagcctgtttccgcgccggcgcgcgggtataagaacggggccccggagtccacggacataccgcccggctcgatcgctgccgcgccgcagggtgaccggtgcccaatcgtccgtcagcgcggggtcgcctcgcccccggtactgccccccatgaaccccgttccaacatcgggcaccccggcccccgcgccgcccggcgacgggagctacctgtggatcccggcctcccattacaaccagctcgtcgccggccacgccgcgccccaaccccagccgcattccgcgtttggtttcccggctgcggcgggggccgtggcctatgggcctcacggcgcgggtctttcccagcattaccctccccacgtcgcccatcagtatcccggggtgctgttctcgggacccagcccactcgaggcgcagatagccgcgttggtgggggccatagccgcggaccgccaggcgggcggtcagccggccgcgggagaccctggggtccgggggtcgggaaagcgtcgccggtacgaggcggggccgtcggagtcctactgcgaccaggacgaaccggacgcggactacccgtactaccccggggaggctcgaggcgggccgcgcggggtcgactctcggcgcgcggcccgccagtctcccgggaccaacgagaccatcacggcgctgatgggggcggtgacgtctctgcagcaggaactggcgcacatgcgggctcggaccagcgccccctatggaatgtacacgccggtggcgcactatcgccctcaggtgggggagccggaaccaacaacgacccacccggccctttgtcccccggaggccgtgtatcgccccccaccacacagcgccccctacggtcctccccagggtccggcgtcccatgcccccactcccccgtatgccccagctgcctgcccgccaggcccgccaccgcccccatgtccttccacccagacgcgcgcccctctaccgacggagcccgcgttcccccccgccgccaccggatcccaaccggaggcatccaacgcggaggccggggcccttgtcaacgccagcagcgcagcacacgtggacgttgacacggcccgcgccgccgatttgttcgtctctcagatgatgggggcccgctgattcgccccggtctttggtaccatgggatgtcttactgtatatctttttaaataaaccaggtaataccaaataagacccattggtgtatgttcttttttttttattgggaggggcgggtaggcgggtagctttacaatgcaaaagcctttgacgtggaggaaggcgtgggggggaggaaatcggcactgaccaagggggtccgttttgtcacgggaaaggaaagaggaaacaggccgcggacacccgggggagtttatgtgttcctttttctttcttcccacacacacacaaaaggcgtaccaaacaaaaaaaccaaaagatgcgcatgcggtttaacacccgtggtttttatttacaacaaaccccccgtcacaggtcgtcctcgtcggcgtcaccgtctttgttgggaacttgggtgtagttggtgttgcggcgcttgcgcatgaccatgtcggtgaccttggcgctgagcagcgcgctcgtgcccttcttcttggccttgtgttccgtgcgctccatggccgacaccagggccatgtaccgtatcatctccctggcctcggctagcttggcctcgtcaaagtcgccgccctcctcgccctccccggacgcgtccgggttggtggggttcttgagctccttggtggttagagggtacagggccttcatggggttgctctgcagccgcatgacgtaacgaaaggcgaagaaggccgccgccaggccggccaggaccaacagacccacggccagcgccccaaaggggttggacatgaaggaggacacgcccgacacggccgataccacgccgcccacgatgcccatcaccaccttgccgaccgcgcgccccaggtcgcccatcccctcgaagaacgcgcccaggcccgcgaacatggcggcgttggcgtcggcgtggatgaccgtgtcgatgtcggcgaagcgcaggtcgtgcagctggttgcggcgctggacctccgtgtagtccagcaggccgctgtccttgatctcgtggcgggtgtacacctccagggggacaaactcgtgatcctccagcatggtgatgttgaggtcgatgaaggtgctgacggtggtgatgtcggcgcggctcagctggtgggagtacgcgtactcctcgaagtacacgtagcccccaccgaaggtgaagtagcgccggtgtcccacggtgcacggctcgatcgcatcgcgcgtcagccgcagctcgttgttctcccccagctgcccctcgaccaacgggccctggtcttcgtaccgaaagctgaccagggggcggctgtagcaggccccgggccgcgagctgatgcgcatcgagttttggacgatcacgttgtccgcggcgaccggcacgcacgtggagacggccatcacgtcgccgagcatccgcgcgctcacccgccggcccacggtgaccgaggcgatggtgttggggttcagcttgcgggcctcgttccacagggtcagctcgtgattctgtagctcgcaccacgcgatggcaacgcggcccaacatatcgttgacatggcgctgtatgtggttgtacgtaaactgcagccgggcgaactcgatggaggaggtggtcttgatgcgctccacggacgcgttggcgctggccccgggcggcgggggcgtggggtttgggggcttgcggctctgctctcggaggtgttcccgcacgtacagctccgcgagcgtgttgctgagaaggggctggtacgcgatcagaaagcccccattggccaggtagtactgcggctggcccaccttgatgtgcgtcgcgttgtacctgcgggcgaagatgcggtccatggcgtcgcgggcgtccttgccgatgcagtcccccaggtccacgcgcgagagcgggtactcggtcaggttggtggtgaaggtggtggatatggcgtcggaggagaatcggaaggagccgccgtactcggagcgcagcatctcgtccacttcctgccacttggtcatggtgcagaccgacgggcgctttggcacccagtcccaggccacggtgaacttgggggtcgtgagcaggttccgggtggtcggcgccgtggcccgggccttggtggtgaggtcgcgcgcgtagaagccgtcgacctgcttgaagcggtcggcggcgtagctggtgtgttcggtgtgcgacccctcccggtagccgtaaaacggggacatgtacacaaagtcgccagtcgccagcacaaactcgttgtacgggtacaccgagcgcgcgtccacctcctcgacgatgcagtttaccgtcgtcccgtaccggtggaacgcctccacccgcgaggggttgtacttgaggtcggtggtgtgccagccccggctcgtgcgggtcgcggcgttggccggtttcagctccatgtcggtctcgtggtcgtcccggtgaaacgcggtggtctccaggttgttgcgcacgtacttggccgtggaccgacagacccccttggcgttgatcttgtcgatcacctcctcgaaggggacgggggcgcggtcctcaaagatccccataaactgggagtagcggtggccgaaccacacctgcgaaacggtgacgtctttgtagtacatggtggccttgaacttgtacggggcgatgttctccttgaagaccaccgcgatgccctccgtgtagttctgaccctcgggccgggtcgggcagcggcgcggctgctcgaactgcaccaccgtggcgcccgtggggggtgggcacacgtaaaagtttgcatcggtgttctccgccttgatgtcccgcaggtgctcgcgcagggtggcgtggcccgcggcgacggtcgcgttgtcgccggcggggcgtggtggcgttgggtttttcggttttttgttcttcttcggtttcgggtcccccgttggggcggcgccaagggcgggcggcgccggagtggcagggcccccgttcgccgcctgggtcgcggccgcgaccccaggcgtgccgggggaactcggagccgccgacgccaccaggacccccagcgtcaaccccaagagcgcccatacgacgaaccaccggcgcccccacgagggggcgccctggtgcatggcgggactacgggggcccgtcgtgccccccgtcaggtagcctgggggcgaggtgctggaggaccgagtagaggatcgagaaaacgtcgcggtcgtagaccacgaccgaccgggggccgatacagccgtcgggggcgctctcgacgatggccaccagcggacagtcggagtcgtacgtgagatatacgccgggcgggtaacggtaacgaccttcggaggtcgggcggctgcagtccgggcggcgcaactcgagctccccgcaccggtagaccgaggcaaagagtgtggtggcgataatcagctcgcgaatatatcgccaggcggcgcgctgagtgggcgttattccggaaatgccgtcaaaacagtaaaacctctgaaattcgctgacggcccaatcagcacccgagccccccgcccccatgatgaaccgggcgagctcctccttcaggtgcggcaggagccccacgttctcgacgctgtaatacagcgcggtgttggggggctgggcgaagctgtgggtggagtgatcaaagaggggcccgttgacgagctcgaagaagcgatgggtgatgctggggagcagggccgggtccacctggtgtcgcaggagagacgctcgcatgaaccggtgcgcgtcgaacacgcccggcgccgagcggttgtcgatgaccgtgcccgcgcccgccgtcagggcgcagaagcgcgcgcgcgccgcaaagccgttggcgaccgcggcgaacgtcgcgggcagcacctcgccgtggacgctgacccgcagcatcttctcgagctccccgcgctgctcgcggacgcagcgccccaggctggccaacgaccgcttcgtcaggcggtccgcgtacagccgccgtcgctcccgtacgtccgcggccgcttgcgtggcgatgtccccccacgtctcgggcccctgccccccgggcccgcggcgacggtcttcgtcctcgcccccgcccccgggagctcccaacccccgtgccccttcctctacggcgacacggtccccgtcgtcgtcggggcccgcgccgcccttgggcgcgtccgccgcgccccccgcccccatgcgcgccagcacgcgacgcagcgcctcctcgtcgcactgttcggggctgacgaggcgccgcaagagcggcgtcgtcaggtggtggtcgtagcacgcgcggatgagcgcctcgatctgatcgtcgggtgacgtggcctgaccgccgattattagggcgtccaccatatccagcgccgccaggtggctcccgaacgcgcgatcgaaatgctccgcccgccgcccgaacagcgccagttccacggccaccgcggcggtctcctgctgcaactcgcgccgcgccagcgcggtcaggttgctggcaaacgcgtccatggtggtctggccggcgcggtcgccggacgcgagccagaatcgcaattcgctgatggcgtacaggccgggcgtggtggcctgaaacacgtcgtgcgcctccagcagggcgtcggcctccttgcggaccgagtcgttctcgggcgacgggtggggctgcccgtcgccccccgcggtccgggccagcgcatggtccaacacggagagcgcccgcgcgcggtcggcgtccgacagcccggcggcgtggggcaggtaccgccgcagctcgttggcgtccagccgcacctgcgcctgctgggtgacgtggttacagatacggtccgccaggcggcgggcgatcgtcgccccctggttcgccgtcacacacagttcctcgaaacagaccgcgcaggggtgggacgggtcgctaagctccggggggacgataaggcccgaccccaccgcccccaccataaactcccgaacgcgctccagcgcggcggtggcgccgcgcgagggggtgatgaggtggcagtagtttagctgctttagaaagttctcgacgtcgtgcaggaaacacagctccatatggacggtcccgccatacgtatccagcctgacccgttggtgatacggacagggtcgggccaggcccatggtctcggtgaaaaacgccgcgacgtctcccgcggtcgcgaacgtctccaggctgcccaggagccgctcgccctcgcgccacgcgtactctagcagcaactccagggtgaccgacagcggggtgagaaaggccccggcctgggcctccaggcccggcctcagacgacgccgcagcgcccgcacctgaagcgcgttcagcttcagttgggggagcttcccccgtccgatgtgggggtcgcaccgccggagcagctctatctgaaacacataggtctgcacctgcccgagcagggctaacaacttttgacgggccacggtgggctcggacaccggggcggccatctcgcggcgccgatctgtaccgcggccggagtatgcggtggaccgaggcggtccgtacgctacccggtgtctggctgagccccggggtccccctcttcggggcggcctcccgcgggcccgccgaccggcaagccgggagtcggcggcgcgtgcgtttctgttctattcccagacaccgcggagaggaatcacggcccgcccagagatatagacacggaacacaaacaagcacggatgtcgtagcaataatttattttacacacattccccgccccgccctaggttcccccaccccccaacccctcacagcatatccaacgtcaggtctccctttttgtcggggggcccctccccaaacgggtcatccccgtggaacgcccgtttgcggccggcaaatgccggtcccggggcccccgggccgccgaacggcgtcgcgttgtcgtcctcgcagccaaaatccccaaagttaaacacctccccggcgttgccgagttggctgactagggcctcggcctcgtgcgccacctccagggccgcgtccgtcgaccactcgccgttgccgcgctccagggcacgcgcggtcagctccatcatctcctcgcttaggtactcgtcctccaggagcgccagccagtcctcgatctgcagctgctgggtgcggggccccaggcttttcacggtcgccacgaacacgctactggcgacggccgccccgccctcggagataatgccccggagctgctcgcacagcgagctttcgtgcgctccgccgccgaggttcgaggccgcgcacacaaacccggcccggggacaggccaggacgaacttgcgggtgcggtcaaaaataaggagcgggcacgcgtttttgccgcccatcaggctggcccagttcccggcctgaaacacacggtcgttgccggccatgccgtagtatttgctgatgctcaaccccaacacgaccatggggcgcgccgccatgacgggccgcagcaggttgcagctggcgaacatggacgtccacgcgcccggatgcgcgtccacggcgtccatcagcgcgcgggccccggcctccaggcccgccccgccctgcgcggaccacgcggccgccgcctgcacgctggggggacggcgggaccccgcgatgatggccgtgagggtgttgatgaagtatgtcgagtgatcgcagtaccgcagaatctggtttgccatgtagtacatcgccagctcgctcacgttgttgggggccaggttaataaagtttatcgcgccgtagtccagggaaaactttttaatgaacgcgatggtctcgatgtcctcgcgcgacaggagccgggcgggaagctggttgcgttggagggccgtccagaaccactgcgggttcggctggttggaccccgggggcttgccgttggggaagatggccgcgtggaactgcttcagcagaaagcccagcggtccgaggaggatgtccacgcgcttgtcgggcttctggtaggcgctctggaggctggcgacccgcgccttggcggcctcggacgcgttggcgctcgcgcccgcgaacaacacgcggctcttgacgcgcagctccttgggaaaccccagggtcacgcgggcaacgtcgccctcgaagctgctctcggcgggggccgtctggccggccgttaggctgggggcgcagatagccgccccctccgagagcgcgaccgtcagcgttttggccgacagaaacccgttgttaaacatgtccatcacgcgccgccgcagcaccggttggaattgattgcgaaagttgcgcccctcgaccgactgcccggcgaacaccccgtggcactggctcagggccaggtcctgatacacggcgaggttggatcgccgcccgagaagctgaagcagggggcatggcccgcacgcgtacgggtccagcgtcagggacatggcgtggttggcctcgcccagaccgtcgcgaaacttgaagttcctcccctccaccaggttgcgcatcagctgctccacctcgcggtccacgacctgcctgacgttgttcaccaccgtatgcagggcctcgcggttggtgatgatggtctccagccgccccatggccgtggggaccgcctggtccacgtactgcagggtctcgagttcggccatgacgcgctcggtcgccgcgcggtacgtctcctgcatgatggtccgggcggtctcggatccgtccgcgcgcttcagggccgagaaggcggcgtagtttcccagcacgtcgcagtcgctgtacatgctgttcatggtcccgaagacgccgatggctccgcgggcggcgctggcgaacttgggatggcgcgcccggaggcgcatgagcgtcgtgtgtacgcaggcgtggcgcgtgtcgaaggtgcacaggttgcagggcacgtcggtctggttggagtccgcgacgtatcgaaacacgtccatctcctggcgcccgacgatcacgccgccgtcgcagcgctccaggtaaaacagcatcttggccagcagcgccggggaaaacccacacagcatggccaggtgctcgccggcaaattcctgggttccgccgacgaggggcgcggtgggccgaccctcgaacccgggcaccacgtgtccctcgcggtccacctgtgggttggccgccacgtgggtcccgggcacgaggaagaagcggtaaaaggagggtttgctgtggtcctttgggtccgccggaccggcgtcgtccacctcggtgagatggagggccgagttggtgctaaataccatggcccccacgagtcccgcggcgcgcgccaggtacgccccgacggcgttggcgcgggccgcggccgtgtcctggccctcgcacagcggccacgcggagatgtcggtgggcggctcgtcgaagacggccatcgacacgatagactcgagggccagggcggcgtctccggccatgacggaggccaggcgctgttcgaacccgcccgccgggcccttgccgccgccgtcgcgcccaccccgcggggtcttaccctggctggcttcgaaggccgtgaacgtaatgtcggcggggagggcggcgccctcgtggttttcgtcaaacgccaggtgggcggccgcgcgggccacggcgtccacgtttcggcatcgcagtgccacggcggcgggtcccacgaccgcctcgaacaggaggcggttgagggggcggttaaaaaacggaagcgggtaggtaaaattctccccgatcgatcggtggttggcgttgaacggctcggcgatgacccggctaaaatccggcatgaacagctgcaacggatacacgggtatgcggtgcacctccgccccgcctatggttaccttgtccgagcctcccaggtgcagaaaggtgttgttgatgcacacggcctccttgaagccctcggtaacgaccagatacaggagggcgcggtccgggtccaggccgaggcgctcacacagcgcctcccccgtcgtctcgtgtttgaggtcgccgggccggggggtgtagtccgaaaagccaaaatggcggcgtgcccgctcgcagagtcgcgtcaggtttggggcctgggtgctggggtccaggtgccggccgccgtgaaagacgtacacggacgagctgtagtgcgatggcgtcagtttcagggacaccgcggtacccccgagccccgtcgtgcgagaacccacgaccacggctacgttggcctcaaagccgctctccacggtcaggcccacgaccaggggcgccacggcgacgtcggcatcgccgctgcgcgccgacagtaacgccagaagctcgatgccttcggacggacacgcgcgagcgtacacgtatcccaggggcccgggggggaccttgatggtggttgccgtcttgggctttgtctccatgtcctcctggcaatcggtccgcaaacggaggtaatcccggcacgacgacggacgcccgacgaggtatgtctcccgagcgtcaaaatccgggggggggggcggcgacggtcaaggggagggtgggagaccggggttggggaatgaatccctacccttcacagacaacccccgggtaaccacggggtgccgatgaaccccggcggctggcaacgcggggtccctgcgagaggcacagatgcttacggtcaggtgctccgggccgggtgcgtctgatatgcggttggtatatgtacactttacctgggggcgtgccggaccgccccagcccctcccacaccccgcgcgtcatcagccggatttaaatccggctacgtcacgctcctgtcggccgccggcggtccataagcccggccggccgggccgacgcgaataaaccgggccgccggccggggcgccgcgcagcagctcgccgcccggatccgccagacaaacaaggcccttgcacatgccggcccgggcgagcctgggggtccggtaattttgccatcccacccaagcggcttttggggtttttcctcttcccccctccccacatcccccctctttaggggttcgggtgggaacaaccgcgatgttttccggtggcggcggcccgctgtcccccggaggaaagtcggcggccagggcggcgtccgggttttttgcgcccgccggccctcgcggagccggccggggacccccgccttgtttgaggcaaaacttttacaacccctacctcgccccagtcgggacgcaacagaagccgaccgggccaacccagcgccatacgtactatagcgaatgcgatgaatttcgattcatcgccccgcgggtgctggacgaggatgcccccccggagaagcgcgccggggtgcacgacggtcacctcaagcgcgcccccaaggtgtactgcgggggggacgagcgcgacgtcctccgcgtcgggtcgggcggcttctggccgcggcgctcgcgcctgtggggcggcgtggaccacgccccggcggggttcaaccccaccgtcaccgtctttcacgtgtacgacatcctggagaacgtggagcacgcgtacggcatgcgcgcggcccagttccacgcgcggtttatggacgccatcacaccgacggggaccgtcatcacgctcctgggcctgactccggaaggccaccgggtggccgttcacgtttacggcacgcggcagtacttttacatgaacaaggaggaggttgacaggcacctacaatgccgcgccccacgagatctctgcgagcgcatggccgcggccctgcgcgagtccccgggcgcgtcgttccgcggcatctccgcggaccacttcgaggcggaggtggtggagcgcaccgacgtgtactactacgagacgcgccccgctctgttttaccgcgtctacgtccgaagcgggcgcgtgctgtcgtacctgtgcgacaacttctgcccggccatcaagaagtacgagggtggggtcgacgccaccacccggttcatcctggacaaccccgggttcgtcaccttcggctggtaccgtctcaaaccgggccggaacaacacgctagcccagccgcgggccccgatggccttcgggacatccagcgacgtcgagtttaactgtacggcggacaacctggccatcgaggggggcatgagcgacctaccggcatacaagctcatgtgcttcgatatcgaatgcaaggcggggggggaggacgagctggcctttccggtggccgggcacccggaggacctggttattcagatatcctgtctgctctacgacctgtccaccaccgccctggagcacgtcctcctgttttcgctcggttcctgcgacctccccgaatcccacctgaacgagctggcggccaggggcctgcccacgcccgtggttctggaattcgacagcgaattcgagatgctgttggccttcatgacccttgtgaaacagtacggccccgagttcgtgaccgggtacaacatcatcaacttcgactggcccttcttgctggccaagctgacggacatttacaaggtccccctggacgggtacggccgcatgaacggccggggcgtgtttcgcgtgtgggacataggccagagccacttccagaagcgcagcaagataaaggtgaacggcatggtgaacatcgacatgtacgggatcataaccgacaagatcaagctctcgagctacaagctcaacgccgtggccgaagccgtcctgaaggacaagaagaaggacctgagctatcgcgacatccccgcctactacgccaccgggcccgcgcaacgcggggtgatcggcgagtactgcatacaggattccctgctggtgggccagctgttttttaagtttttgccccatctggagctctcggccgtcgcgcgcttggcgggtattaacatcacccgcaccatctacgacggccagcagatccgcgtctttacgtgcctgctgcgcctggccgaccagaagggctttattctgccggacacccaggggcgatttaggggcgccgggggggaggcgcccaagcgtccggccgcagcccgggaggacgaggagcggccagaggaggagggggaggacgaggacgaacgcgaggagggcgggggcgagcgggagccggagggcgcgcgggagaccgccggccggcacgtggggtaccagggggccagggtccttgaccccacttccgggtttcacgtgaaccccgtggtggtgttcgactttgccagcctgtaccccagcatcatccaggcccacaacctgtgcttcagcacgctctccctgagggccgacgcagtggcgcacctggaggcgggcaaggactacctggagatcgaggtgggggggcgacggctgttcttcgtcaaggctcacgtgcgagagagcctcctcagcatcctcctgcgggactggctcgccatgcgaaagcagatccgctcgcggattccccagagcagccccgaggaggccgtgctcctggacaagcagcaggccgccatcaaggtcgtgtgtaactcggtgtacgggttcacgggagtgcagcacggactcctgccgtgcctgcacgttgccgcgacggtgacgaccatcggccgcgagatgctgctcgcgacccgcgagtacgtccacgcgcgctgggcggccttcgaacagctcctggccgatttcccggaggcggccgacatgcgcgcccccgggccctattccatgcgcatcatctacggggacacggactccatatttgtgctgtgccgcggcctcacggccgccgggctgacggccatgggcgacaagatggcgagccacatctcgcgcgcgctgtttctgccccccatcaaactcgagtgcgaaaagacgttcaccaagctgctgctgatcgccaagaaaaagtacatcggcgtcatctacgggggtaagatgctcatcaagggcgtggatctggtgcgcaaaaacaactgcgcgtttatcaaccgcacctccagggccctggtcgacctgctgttttacgacgataccgtatccggagcggccgccgcgttagccgagcgccccgcagaggagtggctggcgcgacccctgcccgagggactgcaggcgttcggggccgtcctcgtagacgcccatcggcgcatcaccgacccggagagggacatccaggactttgtcctcaccgccgaactgagcagacacccgcgcgcgtacaccaacaagcgcctggcccacctgacggtgtattacaagctcatggcccgccgcgcgcaggtcccgtccatcaaggaccggatcccgtacgtgatcgtggcccagacccgcgaggtagaggagacggtcgcgcggctggccgccctccgcgagctagacgccgccgccccaggggacgagcccgccccccccgcggccctgccctccccggccaagcgcccccgggagacgccgtcgcatgccgaccccccgggaggcgcgtccaagccccgcaagctgctggtgtccgagctggccgaggatcccgcatacgccattgcccacggcgtcgccctgaacacggactattacttctcccacctgttgggggcggcgtgcgtgacattcaaggccctgtttgggaataacgccaagatcaccgagagtctgttaaaaaggtttattcccgaagtgtggcaccccccggacgacgtggccgcgcggctccgggccgcagggttcggggcggtgggtgccggcgctacggcggaggaaactcgtcgaatgttgcatagagcctttgatactctagcatgagccccccgtcgaagctgatgtccctcattttacaataaatgtctgcggccgacacggtcggaatctccgcgtccgtgggtttctctgcgttgcgccggaccacgagcacaaacgtgctctgccacacgtgggcgacgaaccggtaccccgggcacgcggtgagcatccggtctatgagccggtagtgcaggtgggcggacgtgccgggaaagatgacgtacagcatgtggcccccgtaagtggggtccgggtaaaacaacagccgcgggtcgcacgccccgcctccgcgcaggatcgtgtggacgaaaaaaagctcgggttggccaagaatcccggccaagaggtcctggaggggggcgttgtggcggtcggccaacacgaccaaggaggccaggaaggcgcgatgctcgaatatcgtgttgatctgctgcacgaaggccaggattagggcctcgcggctggtggcggcgaaccgcccgtctcccgcgttgcacgcgggacagcaacccccgatgcctaggtagtagcccatcccggagagggtcaggcagttgtcggccacggtctggtccagacagaagggcagcgacacgggagtggtcttcaccaggggcaccgagaacgagcgcacgatggcgatctcctcggagggcgtctgggcgagggcggcgaaaaggccccgatagcgctggcgctcgtgtaaacacagctcctgtttgcgggcgtgaggcggcaggctcttccgggaggcccgacgcaccacgcccagagtcccgccggccgcagaggagcacgaccgccggcgctccttgccgtgatagggcccgggccgggagccgcggcgatgggggtcggtatcatacataggtacacagggtgtgctccagggacaggagcgagatcgagtggcgtctaagcagcgcgcccgcctcacggacaaatgtggcgagcgcggtgggctttggtacaaatacctgatacgtcttgaaggtgtagatgagggcacgcaacgctatgcagacacgcccctcgaactcgttcccgcaggccagcttggccttgtggagcagcagctcgtcgggatgggtggcggggggatggccgaacagaacccaggggtcaacctccatctccgtgatggcgcacatggggtcacagaacatgtgcttaaagatggcctcgggccccgcggcccgcagcaggctcacaaaccggcccccgtccccgggctgcgtctcggggtccgcctcgagctggtcgacgacgggtacgatacagtcgaagaggctcgtgttgttttccgagtagcggaccacggaggcccggagtctgcgcagggccagccagtaagcccgcaccagtaacaggttacacagcaggcattctccgccggtgcgcccgcgcccccggccgtgtttcagcacggtggccatcagagggcccaggtcgaggtcgggctgggcatcgggttcggtaaactgcgcaaagcgcggagccacgtcgcgcgtgcgtgccccgcgatgcgcttcccaggactggcggaccgtggcgcgacgggcctccgcggcagcgcgcagctggggccccgactcccagacggcgggggtgccggcgaggagcagcaggaccagatccgcgtacgcccacgtatccggcgactcctccggctcgcggtccccggcgaccgtctcgaattccccgttgcgagcggcggcgcgcgtacagcagctgtccccgcccccgcgccgaccctccgtgcagtccaggagacgggcgcaatccttccagttcatcagcgcggtggtgagcgacggctgcgtgccggatcccgccgccgaccccgccccctcctcgcccccggaggccaaggttccgatgagggcccgggtggcagactgcgccaggaacgagtagttggagtactgcaccttggcggctcccggggagggcgagggcttgggttgcttctgggcatgccgcccgggcaccccgccgtcggtacggaagcagcagtggagaaaaaagtgccggtggatgtcgtttatggtgagggcaaagcgtgcgaaggagccgaccagggtcgccttcttggtgcgcagaaagtggcggtccatgacgtacacaaactcgaacgcggccacgaagatgctagcggcgcagtggggcgcccccaggcatttggcacagagaaacgcgtaatcggccacccactggggcgagaggcggtaggtttgcttgtacagctcgatggtgcggcagaccagacagggccggtccagcgcgaaggtgtcgatggccgccgcggaaaagggcccggtgtccaaaagcccctccccacagggatccgggggcgggttgcggggtcctccgcgcccgcccgaaccccctccgtcgcccgcccccccgcgggcccttgagggggcggtgaccacgtcggcggcgacgtcctcgtcgagcgtaccgacgggcggcacacctatcacgtgactggccgccaggagctcggcgcagagagcctcgttaagagccaggaggctgggatcgaaggccacatacgcgcgctcgaacgcccccgccttccagctgctgccgggggactcttcgcacaccgcgacgctcgccaggaccccggggggcgaagttgccatggctgggcgggaggggcgcacgcgccagcgaactttacgggacacaatccccgactgcgcgctgcggtcccagaccctggagagtctagacgcgcgctacgtctcgcgagacggcgcgcatgacgcggccgtctggttcgaggatatgacccccgccgagctggaggttgtcttcccgactacggacgccaagctgaactacctgtcgcggacgcagcggctggcctccctcctgacgtacgccgggcctataaaagcgcccgacgacgccgccgccccgcagaccccggacaccgcgtgtgtgcacggcgagctgctcgcccgcaagcgggaaagattcgcggcggtcattaaccggttcctggacctgcaccagattctgcggggctgacgcgcgcgctgttgggcgggacggttcgcgaaccctttggtgggtttacgcgggcacgcacgctcccatcgcgggcgccatggcgggactgggcaagccctaccccggccacccaggtgacgccttcgagggtctcgttcagcgaattcggcttatcgtcccatctacgttgcggggcggggacggggaggcgggcccctactctccctccagcctcccctccaggtgcgcctttcagtttcatggccatgacgggtccgacgagtcgtttcccatcgagtatgtactgcggcttatgaacgactgggccgaggtcccgtgcaacccttacctgcgcatacagaacaccggcgtgtcggtgctgtttcaggggttttttcatcgcccacacaacgcccccgggggcgcgattacgccagagcggaccaatgtgatcctgggctccaccgagacgacggggctgtccctcggcgacctggacaccatcaaggggcggctcggcctggatgcccggccgatgatggccagcatgtggatcagctgctttgtgcgcatgccccgcgtgcagctcgcgtttcggttcatgggccccgaagatgccggacggacgagacggatcctgtgccgcgccgccgagcaggctattacccgtcgccgccgaacccggcggtcccgggaggcgtacggggccgaggccgggctgggggtggctggaacgggtttccgggccaggggggacggttttggcccgctccccttgttaacccaagggccctcccgcccgtggcaccaggccctgcggggtcttaagcacctacggattggcccccccgcgctcgttttggcggcgggactcgtcctgggggccgctatttggtgggtggttggtgctggcgcgcgcctataaaaaaggacgcaccgccgccctaatcgccagtgcgttccggacgccttcgccccacacagccctcccgtccgacacccccatatcgcttcccgacctccggtcccgatggccgtcccgcaatttcaccgccccagcaccgttaccaccgatagcgtccgggcgcttggcatgcgcgggctcgtcttggccaccaataactctcagtttatcatggataacaaccacccgcacccccagggcacccaaggggccgtgcgggagtttctccgcggtcaggcggcggcgctgacggaccttggtctggcccacgcaaacaacacgtttaccccgcagcctatgttcgcgggcgacgccccggccgcctggttgcggcccgcgtttggcctgcggcgcacctattcaccgtttgtcgttcgagaaccttcgacgcccgggaccccgtgaggcccggggagttccttctggggtgttttaatcaataaaagaccacaccaacgcacgagccttgcgtttaatgtcgtgtttattcaagggagtgggatagggttcgacggttcgaaacttaacacacaaaataatcgagcgcgtctagcccagtaacatgcgcacgtgatgtaggctggtcagcacggcgtcgctgtgatgaagcagcgcccggcgggtccgctgtaactgctgttgtaggcggtaacaggcgcggatcagcaccgccagggcgctacgaccggtgcgttgcacgtagcgtcgcgacagaactgcgtttgccgatacgggcggggggccgaattgtaagcgcgtcacctcttgggagtcatcggcggataacgcactgaatggttcgttggttatgggggagtgtggttcccgagggagtgggtcgagcgcctcggcctcggaatccgagaggaacaacgaggtggtgtcggagtcttcgtcgtcagagacatacagggtctgaagcagcgacacgggcgggggggtagcgtcaatgtgtagcgcgagggaggatgcccacgaagacaccccagacaaggagctgcccgtgcgtggatttgtggacgacgcggaagccgggacggatgggcggttttgcggtgcccggaaccgaaccgccggatactccccgggtgctacatgcccgttttggggctggggttggggctggggctggggctggggttggggctggggctggggttggggctggggttggggctggggctggggttggggctggggttggggctggggttggggctggggctggggttggggttggggctggggttggggttggggctggggctggggctggggttggggctggggttggggttggggctggggttggggttggggctggggttggggctggggttggggttggggctggggttggggctggggctggggctggggctggggttggggctggggttggggctggggttggggctggggttggggctggggttggggctggggctggggttggggttggggttggggttggggctggggttggggttggggctggggttggggttggggctggggttggggctggggttggggctggggttggggctggggttggggctggggttggggctggggttggggctggggttggggctggggttggggctggggttggggctggggttggggctggggttggggctggggcgcggacaggcggttgacggtcaaatgcccccgggggcgcgcagatgtggtgggcgtggccaccggctgccgtgtagtggggcggcgggaaaccgggcctccgggcgtaacaccgccctccagcgtcaagtatgtggggggcgggcctgacgtcgggggcggggtgacgggttggaccgcgggaggcgggggagagggacctgcgggagaggatgaggtcggctcggccgggttgcggcctaaaacaggggccgtggggtcggcggggtcccagggtgaagggagggattcccgcgattcggacagcgacgcgacagcggggcgcgtaaggcgccgctgcggcccgcctacgggaaccctggggggggttggcgcgggacccgaggttagcggggggcggcggttttcgcccccgggcaaaaccgtgccggttgcgaccgggggcggaacgggatcgatagggagagcgggagaagcctggccggcgaactggggaccgagcgggaggggcacaccagacaccaaagcgtggagcgctggctctgggggtttgggaggggccggggggcgcgcgaaatcggtaaccggggcgaccgtgtcggggagggcaggcggccgccaaccctgggtggtcgcggaagcctgggtggcgcgcgccagggagcgtgcccggcggtgtcggcgcgcgcgcgacccggacgaagaagcggcagaagcgcgggaggaggcgggggggcggggggcggtggcatcggggggcgccggggaactttggggggacggcaagcgccggaagtcgtcgcgggggcccacgggcgccggccgcgtgctttcggccgggacgcccggtcgtgcttcgcgagccgtgactgccggcccagggggccgcggtgcacactgggacgtggggacggactgatcggcggtgggcgaaagggggtccggggcaaggaggggcgcggggccgccggagtcgtcagacgcgagctcctccaggccgtgaatccatgcccacatgcgaggggggacgggctcgccgggggtggcgtcggtgaatagcgtgggggccaggcttccgggccccaacgagccctccgtcccaacaaggtccgccgggccgggggtcgggttcgggaccgaggggctctggtcgtcgggggcgcgctggtacaccggatgccccgggaatagctcccccgacaggagggaggcgtcgaacggccgcccgaggatagctcgcgcgaggaaggggtcctcgtcggtggcgctggcggcgaggacgtcctcgccgcccgccacaaacgggagctcctcggtggcctcgctgccaacaaaccgcacgtcgggggggccgggggggtccgggttttcccacaacaccgcgaccggggtcatggagatgtccacgagcaccagacacggcgggccccgggcgaggggccgctcggcgatgagcgcggacaggcgcgggagctgtgccgccagacacgcgttttcaatcgggttcaggtcggcgtgcaggaggcggacggcccacgtctcgatgtcggacgacacggcatcgcgcaaggcggcgtccggcccgcgagcgcgtgagtcaaacagcgtgagacacagctccagctccgactcgcgggaaaaggccgtggtgttgcggagcgccacgacgacgggcgcgcccaggagcactgccgccagcaccaggtccatggccgtaacgcgcgccgcgggggtgcggtgggtggcggcggccggcacggcgacgtgctggcccgtgggccggtagagggcgttggggggagcggggggtgacgcctcgcgcccccccgaggggctcagcgtctgcccagattccagacgcgcggtcagaagggcgtcgaaactgtcatactctgtgtagtcgtccggaaacatgcaggtccaaagagcggccagagcggtgcttgggagacacatgcgcccgaggacgctcaccgccgccagcgcctgggcgggactcagctttcccagcgcggcgccgcgctcggttcccagctcggggaccgagcgccagggcgccagggggtcggtttcggacaacttgccgcggcgccagtctgccagccgcgtgccgaacatgaggccccgggtcggagggcctccggtcgaaaacactggcagcacgcggatgcgggcgtctggatgcggggtcaggcgctgcacgaatagcatggaatctgctgcgttctgaaacgcacgggggagggtgagatgcatgtactcgtgttggcggaccagatccaggcgccaaaaggtgtaaatgtgttccggggagctggccaccagcgccaccagcacgtcgttctcgttaaaggaaacgcggtgcctagtggagctgtggggcccgagcggcggtcccggggccgccgcgtcacccccccattccagctgggcccagcgacacccaaactcgcgcgtgagagtggtcgcgacgagggcgacgtagagctcggccgccgcatccatcgaggccccccatctcgcctggcggtggcgcacaaagcgtccgaagagctgaaagttggcggcctgggcgtcgctgagggccagctgaagccggttgatgacggtgatgacgtacatggccgtgacggtcgaggccgactccagggtgtccgtcggaagcggggggcgaatgcatgccgcctcgggacacatcagcagcgcgccgagcttgtcggtcacggccgggaagcagagcgcgtactgcagtggcgttccatccgggaccaaaaagctgggggcgaacggccgatccagcgtactggtggcctcgcgcagcaccaggggccccgggcctccgctcactcgcaggtacgcctcgccccggcggcgcagcatctgcgggtcggcctcttggccgggtggggcggacgcccgggcgcgggcgtctagggcgcgaagatccacgagcaggggcgcgggggcggcggccccccccgcgcccgtctggcctgtggccttggcgtacgcgctatataagcccatgcggcgttggatgagctcccgcgcgccccggaactcctccaccgcccatggggccaggtccccggccaccgcgtcgaattccgccaacaggccccccagggtgtcaaagttcatctcccaggccacccttggcaccacctcgtcccgcagccgggcgctcaggtcggcgtgttgggccacgcgccccccgagctcctccacggccccggcccgctcggcgctcttggcgcccaggacgccctggtacttggcgggaaggcgctcgtagtcccgctgggctcgcagccccgacacagtgttggtggtgtcctgcagggcgcgaagctgctcgcatgccgcgcgaaatccctcgggcgatttccaggcccccccgcgaacgcggccgaagcgaccccatacctcgtcccactccgcctcggcctcctcgagagacctccgcagggcctcgacgcggcgacgggtgtcgaagagcgcctgcaggcgcgcgccctgtcgcgtcaggaggcccgggccgtcgccgctggccgcgtttagcgggtgcgtctcaaaggtacgctgggcatgttccaaccaggcgaccgcctgcacgtcgagctcgcgcgccttctccgtctggtccaacagaatttcgacctgatccgcgatctcctccgccgagcgcgcctggtccagcgtcttggccacggtcgccgggacggcgaccaccttcagcagggtcttcagattggccagaccctcggcctcgagctgggcccggcgctcgcgcgcggccagcacctcccgcagccccgccgtgacccgctcggtggcttcggcgcgctgctgtttggcgcgcaccacggcgtccttggtatcggccaggtcctgtcgggtcacgaatgcgacgtagtcggcgtacgccgtgtccttcacggggctctggtccacgcgctccagcgccgccacgcacgccaccagcgcgtcctcgctcgggcagggcagggtgacccctgcccggacaagctcggcggccgccgccgggtcgttgcgcaccgcggatatctcctccgcggcggcggccaggtccagcgccacgcttccgatcgcgcgccgcgcgtcggcccggagggcgtccaggcgatcgcggatatccacgtactcggcgtagcccttttgaaaaaacggcacgtactggcgcagggccggcacgccccccaagtcttccgacaggtgtaggacggcctcgtggtagtcgataaacccgtcgttcgcctgggcccgctccagcagcccccccgccagccgcagaagccgcgccaggggctcggtgtccacccgaaacatgtcggcgtacgtgtcggccgcggccccgaaggccgcgctccagtcgatgcggtgaatggctgcgagcggggggagcatggggtggcgctggttctcgggggtgtatgggttaaacgcaagggccgtctccagggcaagggtcaccgccttggcgttggttcccagcgcctgttcggcccgctttcggaagtcccgggggttgtagccgtgcgtgcccgccagcgcctgcaggcgacggagctcgaccacgtcaaactcggcaccgctttccacgcggtccagcacggcctccacgtcggcggcccagcgctcgtggctactgcgggcgcgctgggccgccatcttctctctcaggtcggcgatggcggcctcaagttcgtcggcgcggcgtcgcgtggcgccgatgacctttcccagctcctgcagggcgcgcccgctgggggagtggtccccggccgtcccttcggcgtgcaacaggcccccgaacctgccctcgtggcccgcgaggctttcccgcgcgccggtggtcgcgcgcgtcgcggcctggatcagggaggcatgctctccctccggttggttggcggcccggcgcacctggacgacaaggtcggctgccgccgaccctaaggtcgtgagctgggcgatggccccccgcgcgtccagggccaaccgagtcgccttgacgtatcccgcggcgctgtcggccatggccgctaggaaggccaggggggaggccgggtcgctggcggccgcgcccagggccgtcaccgcgtcgaccaggacgcggtgcgcccgcacggccgcatccaccgtcgacgcggggtctgccgtcgcgacggcggcgctgccggcgttgatggcgttcgagacggcgtgggctatgatcggggcgtgatcggcgaagaactgcaagagaaacggagtctctggggcgtcggcgaacaggttcttcagcaccaccacgaagctgggatgcaagccagacagagccgtcgccgtgtccggagtcgggtgctccagggcatctcggtactgccccagcagcccccacatgtccgcccgcagcgccgccgtaacctcagggggcgccccccgaacggcctcggggaggtccgaccagcccgccggcagggaggcccgcagggtcgccaggacggccggacaggcctttagccccacaaagtcagggagggggcgcaggaccccctggagtttgtgcaagaacttctcccgggcgtcgcgggccaccttcgcccgctcccgcgctccctcgagcattgcctccagggagcgcgcgcgctcccgcaaacgggcacgcgcatcgggggcgagctctgccgtcagcttggcggcatccatggcccgcgcctgccgcagcgcttcctcggccatgcgcgtggcctctggcgacagcccgccgtcgtcggggtagggcgacgcgccgggcgcaggaacaaaggccgcgtcgctgtccagctgctggcccagggccgcatctagggcgtcgaagcgccgcagctcggccagacccgagctgcggcgcgcctgctggtcgttaatgtcgcggatgctgcgcgccagctcgtccagcggcttgcgttctatcagcccttggttggcggcgtccgtcaggacggagagccaggccgccaggtcctcgggggcgtccagcgtctggccccgctggatcagatcccgcaataggatggccgtggggctggtcgcgatcgggggcggggcgggaatggcggcgcgctgcgcgatgtcccgcgtgtgctggtcgaagacaggcagggactcgagcagctggaccacgggcacgacggcggccgaagccacgtgaaaccggcggtcgttgttgtcgctggcctgtagagccttggcgctgtatacggccccccggtaaaagtactccttaaccgcgccctcgatcgcccgacgggcctgggtccgcacctcctccagccgaacctgaacggcctcggggcccagggggggtgggcgcggagccccctgcggggccgccccggccggggcgggcattacgccgaggggcccggcgtgctgtgagaccgcgtcgaccccgcgagcgagggcgtcgagggcctcgcgcatctggcgatcctccgcctccaccctaatctcttcgccacgggcaaatttggccagagcctggactctatacagaagcggttctgggtgcgtcggggtggcgggggcaaaaagggtgtccgggtgggcctgcgagcgctccagaagccactcgccgaggcgtgtatacagattggccggcggggccgcgcgaagctgcagctccaggtccgcgagttccccgtaaaaggcgtccgtctcccgaatgacatccctagccacaaggatcagcttcgccagcgccaggcgaccgatcagagagttttcgtccagcacgtgctggacgaggggcagatgggcggccacgtcggccaggctcaggcgcgtggaggccagaaagtcccccacggccgttttccggggcagcatgctcagggtaaactccagcagggcggcggccgggccggccaccccggcctgggtgtgcgtccgggccccgttctcgatgagaaaggcgaggacgcgttcaaagaaaaaaataacacagagctccagcagccccggagaagccggatacggcgaccgtaaggcgctgatggtgagccgcgaacacgcggcgacctcgcgggccagggtggcggagcacgcggtgaacttaaccgccgtggcggccacgtttgggtgggcctcgaacagctgggcgaggtctgcgcccgggggctcgggtgagcggcgagtcttcagcgcctcgagggcctgtgaggacgccggaaccatgggcccgtcgtcctcgcccgcctcggcgaccggcggcccggccgggtcggggggtgccgaggcgaggacaggctccggaacggaggcggggaccgcggccccgacgggggttttgcctttgggggtggatttcttcttggttttggcagggggggccgagcgtttcgttttctcccccgaagtcaggtcttcgacgctggaaggcggagtccaggtgggtcggcggcgcttgggaaggccggccgagtagcgtgcccggtgccgaccaaccgggacgacgcccatctccaggacccgcatgtcgtcgtcatcttcttcggccgcctctgcggcgggggtcttgggggcggagggaggcggtggtgggatcgcggagggtgggtcggcggaggggggatccgtgggtggggtaccctttagggccaccgcccatacatcgtcgggcgcccgattcgggcgcttggcctctggttttgccgacggaccggccgtcccccgggatgtctcggaggccctgtcgtcgcgacgggcccgggtcggtggcggcgactgggcggctgtgggcgggtgtggccccggcccccctcccccctcccgggggcccacgccgacgcagggctcccccaggcccgcgatctcgccccgcagggggtgcgtgatggccacgcgccgttcgctgaacgcttcgtcctgcatgtaagtctcgctggccccgtaaagatgcagagccgcggccgtcaagtccgcaggagccgcgggttccgggcccgacggcacgaaaaacaccatggctcccgcccaccgtacgtccgggcgatcgcgggtgtaatacgtcaggtatggatacatgtcccccgcccgcactttggcgatgaacgcgggggtgccctccggaaggccatgcgggtcaaaaaggtatgcggtgtcgccgtccctgaacagccccatccctagggggccaatggttaggagcgtgtacgacagggggcgcagggcccacgggccggcgaagaacgtgtgtgcggggcattgtgtctccagcaggcctgccgcgggctccccgaagaagcccacctcgccgtatacgcgcgagaagacacagcgcagtccgccgcgcgcccctgggtactcgaggaagttggggagctcgacgatcgaacacatgcgcggcggcccagggcccgcagtcgcgcgcgtccactcgcccccctcgaccaaacatccctcgatggcctccgcggacagaacgtcgcgagggcccacatcaaatatgaggctgagaaaggacagcgacgagcgcatgcacgataccgacccccccggctccaggtcgggcgcgaactggttccgagcaccggtgaccacgatgtcgcgatcccccccgcgttccatcgtggagtgcggtggggtgcccgcgatcatatgtgccctgcgggccagagacccggcctgtttatggaccggacccccggggttagtgttgtttccgccacccacgcccccgtaccatggccccggttcccctgattaggctacgagtcgcggtgatcgcttcccaaaaaccgagctgcgtttgtctgtcttggtcttccccccccccagcccgcacaccataacaccgagaacaacacacgggggtgggcggaacataataaagctttattggtaactagttaacggcaagtccgtgggtggcgcgacggtgtcctccgggatcatctcgtcgtcctcgacgggggtgttggaatgaggcgcctcctcgcggtccacctggcgtgggccgtgcccataggcctccggcttctgtgcgtccatgggcgtaggcgcggggagactgtttccggcgtcgcggacctccaggtccctgggagcctccggtccggctaacggacgaaacgcggaagcgcgaaacacgccgtcggtgacccgcaggagctcgttcatcagtaaccaatccatactcagcgtaacggccagcccctggcgagacagatccacggagtccggaaccgcggtcgtctggcccagggggccgaggctgtagtccccccaggcccctaggtcgcgacggctcgtaagcacgacgcggtcggccgcggggctttgcgggggggcgtcctcgggcgcatgcgccattacctctcggatggccgcggcgcgctggtcggccgagctgaccaagggcgccacgaccacggcgcgctccgtctgcaggcccttccacgtgtcgtggagttcctggacaaactcggccacgggctcgggtcccgcggccgcgcgcgcggcttgatagcaggccgacagacgccgccagcgcgctagaaactgacccatgaaacaaaacccggggacctggtctcccgacagcagcttcgacgcccgggcgtgaatgccggacacgacggacagaaacccgtgaatttcgcgccggaccacggccagcacgttgtcctcgtgcgacacctgggccgccagctcgtcgcacacccccaggtgcgccgtggtttcggtgatgacggaacgcaggctcgcgagggacgcgaccagcgcgcgcttggcgtcgtgatacatgctgcagtactgactcaccgcgtcccccatggcctcggggggccagggccccaggcggtcgggcgtgtccccgaccaccgcatacaggcggcgcccgtcgctctcgaaccgacactcgaaaaaggcggagagcgtgcgcatgtgcagccgcagcagcacgatggcgtcctccagttggcgaatcagggggtcggcgcgctcggcgaggtcctgcagcaccccccgggcagccagggcgtacatgctaatcaacaggaggctggtgcccacctcggggggcggggggggctgcagttggaccaggggccgcagctgctcgacggcacccctggagatcacgtacagctcccggagcagctgctctatgttgtcggccatctgcatagtggggccgaggccgccccgggcggccggttcgaggagagtgatcagcgcgcccagtttggtgcgatggccctcgaccgtggggagatagcccagcccaaagtcccgggcccaggccaacacacgcagggcgaactcgaccgggcggggaaggtaggccgcgctacacgtggccctcagcgcgtccccaaccaccagggccagaacgtaggggacgaagcccgggtcggcgaggacgttggggtgaatgccctcgagggcggggaagcggatctgggtcgccgcggccaggtggacagagggggcatggctgggctgcccgacggggagaagcgcggacagcggcgtggccggggtggtgggggtgatgtcccagtgggtctgaccatacacgtcgatccagatgagcgccgtctcgcggagaaggctgggttgaccggaactaaagcggcgctcggccgtctcaaactcccccacgagcgcccgccgcaggctcgccagatgttccgtcggcacggccggccccatgatacgcgccagcgtctggctcagaacgccccccgacaggccgaccgcctcacagagccgcccgtgcgtgtgctcgctggcgccctggacccgcctgaaagtttttacgtagttggcatagtacccgtattcccgcgccagaccaaacacgttcgaccccgcgagggcaatgcacccaaagagctgctggacttcgccgagtccgtggccggcgggcgtccgcgcggggacgcccgccgccagaaacccctccagggccgaaaggtagtgcgtgcagtgcgagggcgtgaacccagcgtcgatcagggtgttgatcaccacggagggcgaattggtattctggatcaacgtccacgtctgctgcagcagagccagcagccgctgctgggcgccggcggagggctgctccccgagctgcagcaggctggagacggcaggctggaagactgccagtgccgacgaactcaggaacggcacgtcgggatcaaacacggccacgtccgtccgcacgcgcgccattagcgtccccgggggcgcacaggccgagcgcgggctgacgcggctgagggccgtcgacacgcgcacctcctcgcggctgcgaaccatcttgttggcctccagtggcggaatcattatggccgggtcgatctcccgcacggtgtgctgaaactgcgccaacaggggcggcgggaccacagccccccgctcgggggtcgtcaggtactcgtccaccagggccaacgtaaagagggcccgtgtgaggggagtgagggtcgcgtcgtctatgcgctggaggtgcgccgagaacagcgtcacccgattactcaccagggccaagaaccggaggccctcttgcacgaacggggcggggaagagcaggctgtacgccggggtggtaaggttcgcgctgggctgccccaacgggaccggcgccagcttgagcgacgtctccccaagggcctcgatggaggtccgcgggctcatggccaagcagctcttggtgacggtttgccagcggtctatccactccacggcgcactggcggacgcggaccggccccagggccgccgcggtgcgcaggccggcggactccagcgcatgggacgtgtcggagccggtgaccgcgaggatggtgtccttgatgacctccatctcccggaaggcctggtcgggggcctcggggagagccaccaccaagcggtgtacgagcaacccggggaggttctcggccaagagcgccgtctccggaagcccgtgggcccggtggagcgcgcacaggtgttccagcagcggccgccagcatgcccgcgcgtctgccggggcgatggccgttcccgacaacagaaacgccgccatggcggcgcgcagcttggccgtggccagaaacgccgggtcgtccgccccgtttgccgtctcggccgtgggggttggcggttggcgaaggccggctaggctcgccaataggcgctgcataggtccgtccgagggcggaccggcgggtgaggtcgtgacgacgggggcctcggacgggagaccgcggtctgccatgacgcccggctcgcgtgggtgggggacagcgtagaccaacgacgagaccgggcgggaatgactgtcgtgcgctgtagggagcggcgaattatcgatcccccgcggccctccaggaaccccgcaggcgttgcgagtaccccgcgtcttcgcggggtgttatacggccacttaagtcccggcatcccgttcgcggacccaggcccgggggattgtccggatgtgcgggcagcccggacggcgtgggttgcggactttcggcggggcggcccaaatggccctttaaacgtgtgtatacggacgcgccgggccagtcggccaacacaacccaccggaggcggtagccgcgtttggctgtggggtgggtggttccgccttgcgtgagtgtcctttcgaccccccccctcccccgggtcttgctaggtcgcgatctgtggtcgcaatgaagaccaatccgctacccgcaaccccttccgtgtggggcgggagtaccgtggaactcccccccaccacacgcgataccgcggggcagggcctgcttcggcgcgtcctgcgccccccgatctctcgccgcgacggcccagtgctccccagggggtcgggaccccggagggcggccagcacgctgtggttgcttggcctggacggcacagacgcgccccctggggcgctgacccccaacgacgataccgaacaggccctggacaagatcctgcggggcaccatgcgcgggggggcggccctgatcggctccccgcgccatcatctaacccgccaagtgatcctgacggatctgtgccaacccaacgcggatcgtgccgggacgctgcttctggcgctgcggcaccccgccgacctgcctcacctggcccaccagcgcgccccgccaggccggcagaccgagcggctgggcgaggcctggggccagctgatggaggcgaccgccctggggtcggggcgagccgagagcgggtgcacgcgcgcgggcctcgtgtcgtttaacttcctggtggcggcgtgtgccgcctcgtacgacgcgcgcgacgccgccgatgcggtacgggcccacgtcacggccaactaccgcgggacgcgggtgggggcgcgcctggatcgtttttccgagtgtctgcgcgccatggttcacacgcacgtcttcccccacgaggtcatgcggtttttcggggggctggtgtcgtgggtcacccaggacgagctagcgagcgtcaccgccgtgtgcgccgggccccaggaggcggcgcacaccggccacccgggccggccccgctcggccgtgatcctcccggcgtgtgcgttcgtggacctggacgccgagctggggctggggggcccgggcgcggcgtttctgtacctggtattcacttaccgccagcgccgggaccaggagctgtgttgtgtgtacgtgatcaagagccagctccccccgcgcgggttggagccggccctggagcggctgtttgggcgcctccggatcaccaacacgattcacggcaccgaggacatgacgcccccggccccaaaccgaaaccccgacttccccctcgcgggcctggccgccaatccccaaaccccgcgttgctctgctggccaggtcacgaacccccagttcgccgacaggctgtaccgctggcagccggacctgcgggggcgccccaccgcacgcacctgtacgtacgccgcctttgcagagctcggcatgatgcccgaggatagtccccgctgcctgcaccgcaccgagcgctttggggcggtcagcgtccccgttgtcatcctggaaggcgtggtgtggcgccccggcgagtggcgggcctgcgcgtgagcgtagcaaacgccccgcccacacaacgctccgcccccaaccccttccccgctgtcactcgttgttcgttgacccggacgtccgccaaataaagccactgaaacccgaaacgcgagtgttgtaacgtcctttgggcgggaggaagccacaaaatgcaaatgggatacatggaaggaacacacccccgtgactcaggacatcggcgtgtccttttgggtttcactgaaactggcccgcgccccacccctgcgcgatgtggataaaaagccagcgcgggtggtttagggtaccacaggtgggtgctttggaaacttgtcggtcgccgtgctcctgtgagcttgcgtccctccccggtttcctttgcgctcccgccttccggacctgctctcgcctatcttctttggctctcggtgcgattcgtcaggcagtggccttgtcgaatctcgaccccaccactcgccggacccgccgacgtcccctctcgagcccgccgaaacccgccgcgtctgttgaaatggccagccgccccgccgcatcctctcccgtcgaagcgcgggccccggttgggggacaggaggccggcggccccagcgcagccacccagggggaggccgccggggcccctctcgcccgcggccaccacgtgtactgccagcgagtcaatggcgtgatggtgctttccgacaagacgcccgggtccgcgtcctaccgcatcagcgatagcaactttgtccaatgtggttccaactgcaccatgatcatagacggagacgtggtgcgcgggcgcccccaggacccgggggccgcggcatcccccgctcccttcgttgcggtgacaaacatcggagccggcagcgacggcgggaccgccgtcgtggcattcgggggaaccccacgtcgctcggcggggacgtctaccggtacccagacgaccgacgtccccaccgaggcccttgggggcccccctcctcctccccgcttcaccctgggtggcggctgttgttcctgtcgcgacacacggcgccgctctgcggtattcgggggggagggggatcccgtcggccccgcggagttcgtctcggacgaccggtcgtccgattccgactcggatgactcggaggacaccgactcggagacgctgtcacacgcctcctcggacgtgtccggcggggccacgtacgacgacgcccttgactccgattcgtcatcggatgactccctgcagatagatggccccgtgtgtcgcccgtggagcaatgacaccgcgcccctggatgtttgccccgggacccccggcccgggcgccgacgccggtggtccctcagcggtagacccacacgcaccgacgccaggggccggcgctggtcttgcggccgatcccgccgtggcccgggacgacgcggaggggctttcggacccccggccacgtctgggaacgggcacggcctaccccgtccccctggaactcacgcccgagaacgcggaggccgtggcgcgctttctgggagatgccgtgaaccgcgaacccgcgctcatgctggagtacttttgccggtgcgcccgcgaggaaaccaagcgtgtcccccccaggacattctgcagcccccctcgcctcacggaggacgactttgggcttctcaactacgcgctcgtggagatgcagcgcctgtgtctggacgttcctccggtcctgccgaacgcatacatgccctattatctcagggagtatgtgacgcggctggtcaacgggttcaagccgctggtgagccggtccgctcgcctttaccgcatcctgggggttctggtgcacctgcggatccggacccgggaggcctcctttgaggagtggctgcgatccaaggaagtggccctggactttggcctgacggaaaggcttcgcgagcacgaagcccagctggtgatcctggcccaggctctggaccattacgactgtctgatccacagcacaccgcacacgctggtcgagcgggggctgcaatcggccctgaagtatgaggagttttacctaaagcgctttggcgggcactacatggagtccgtcttccagatgtacacccgcatcgccggctttttggcctgccgggccacgcgcggcatgcgccacatcgccctggggcgagaggggtcgtggtgggaaatgttcaagttctttttccaccgcctctacgaccaccagatcgtaccgtcgacccccgccatgctgaacctggggacccgcaactactacacctccagctgctacctggtaaacccccaggccaccacaaacaaggcgaccctgcgggccatcaccagcaacgtcagcgccatcctcgcccgcaacgggggcatcgggctatgcgtgcaggcgtttaacgactccggccccgggaccgctagcgtcatacccgccctcaaggtcctcgactcgctggtggcggcgcacaacaaagagagcgcgcgtccaaccggcgcgtgcgtgtacctggagccgtggcacaccgacgtgcgggccgtgctccggatgaagggggtcctcgccggcgaagaggcccagcgctgcgacaatatcttcagcgccctctggatgccagacctgtttttcaagcgcctgattcgccacctggacggcgagaagaacgtcacatggaccctgttcgaccgggacaccagcatgtcgctcgccgactttcacggggaggagttcgagaagctctaccagcacctcgaggtcatggggttcggcgagcagatacccatccaggagctggcctatggcattgtgcgcagtgcggccacgaccgggagccccttcgtcatgttcaaagacgcggtgaaccgccactacatctacgacacccagggggcggccatcgccggctccaacctctgcaccgagatcgtccatccggcctccaagcgatccagtggggtctgcaatctgggaagcgtgaatctggcccgatgcgtctccaggcagacgtttgactttgggcggctccgcgacgccgtgcaggcgtgcgtgctgatggtgaacatcatgatcgacagcacgctacaacccacgccccagtgcacccgcggcaacgacaacctgcggtccatgggaatcggcatgcagggcctgcacacggcctgcctgaagctggggctggatctggagtctgtcgaatttcaggacctgaacaaacacatcgccgaggtgatgctgctgtcggcgatgaagaccagcaacgcgctgtgcgttcgcggggcccgtcccttcaaccactttaagcgcagcatgtatcgcgccggccgctttcactgggagcgctttccggacgcccggccgcggtacgagggcgagtgggagatgctacgccagagcatgatgaaacacggcctgcgcaacagccagtttgtcgcgctgatgcccaccgccgcctcggcgcagatctcggacgtcagcgagggctttgcccccctgttcaccaacctgttcagcaaggtgacccgggacggcgagacgctgcgccccaacacgctcctgctaaaggaactggaacgcacgtttagcgggaagcgcctcctggaggtgatggacagtctcgacgccaagcagtggtccgtggcgcaggcgctcccgtgcctggagcccacccaccccctccggcgattcaagaccgcgtttgactacgaccagaagttgctgatcgacctgtgtgcggaccgcgccccctacgtcgaccatagccaatccatgaccctgtatgtcacggagaaggcggacgggaccctcccagcctccaccctggtccgccttctggtccacgcatataagcgcggactaaaaacagggatgtactactgcaaggttcgcaaggcgaccaacagcggggtctttggcggcgacgacaacattgtctgcacgagctgcgcgctgtgaccgacaaaccccctccgcgccaggcccgccgccactgtcgtcgccgtcccacgcgctcccccgctgccatggattccgcggccccagccctctcccccgctctgacggcccatacgggccagagcgcgccggcggacctggcgatccagattccaaagtgccccgaccccgagaggtacttctacacctcccagtgtcccgacattaaccacctgcgctccctcagcatccttaaccgctggctggaaaccgagcttgttttcgtgggggacgaggaggacgtctccaagctttccgagggcgagctcagcttttaccgcttcctcttcgctttcctgtcggccgccgacgacctggttacggaaaacctgggcggcctctccggcctgtttgagcagaaggacattctccactactacgtggagcaggaatgcatcgaagtcgtacactcgcgcgtgtacaacatcatccagctggtgctttttcacaacaacgaccaggcgcgccgcgagtacgtggccggcaccatcaaccacccggccatccgcgccaaggtggactggctggaagcgcgggtgcgggaatgcgcctccgttccggaaaagttcatcctcatgatcctcatcgagggcatcttttttgccgcctcgtttgccgccatcgcctaccttcgcaccaacaaccttctgcgggtcacctgccagtcaaacgacctcatcagccgggacgaggccgtgcacacgacggcctcgtgttacatctacaacaactacctcggcgggcacgccaagcccccgcccgaccgcgtgtacgggctgttccgccaggcggtcgagatcgagatcggatttatccgatcccaggcgccgacggacagccatatcctgagcccggcggcgctggcggccatcgaaaactacgtgcgattcagcgcggatcgcctgttgggccttatccacatgaagccactgttttccgccccaccccccgacgccagctttccgctgagcctcatgtccaccgacaaacacaccaattttttcgagtgtcgcagcacctcctacgccggggcggtcgtcaacgatctgtgagggtcgcggcgcgcttctacccgtgtttgcccataataaacctctgaaccaaactttgggtctcattgtgattcttgtcagggacgcgggggtgggagaggataaaaggcggcgcaaaaagcagtaaccaggtccgtccagattctgagggcataggataccataattttattggtgggtcgtttgttcggggacaagcgcgctcgtctgacgtttgggctactcgtcccagaatttggccaggacgtccttgtagaacgcgggtgggggggcctgggtccgcagctgctccagaaacctgtcggcgatatcaggggccgtgatatgccgggtcacaatagatcgcgccaggttttcgtcgcggatgtcctggtagataggcaggcgtttcagaagagtccacggcccccgctccttggggccgataagcgatatgacgtacttaatgtagcggtgttccaccagctcggtgatggtcatgggatcggggagccagtccagggactctggggcgtcgtggatgacgtggcgtcgccggctggccacataactgcggtgctcttccagcagctgcgcgttcgggacctggacgagctcgggcggggtgagtatctccgaggaggacgacctggggccggggtggcccccggtaacgtcccggggatccagggggaggtcctcgtcgtcttcgtatccgccggcgatctgttgggttagaatttcggtccacgagacgcgcatctcggtgccgccggcggccggcggcaaagggggcctggtttccgtggagcgcgagctggtgtgttcccggcggatggcccgccgggtctgagagcgactcgggggggtccagtgacattcgcgcagcacatcctccacggaggcgtaggtgttattgggatggaggtcggtgtggcagcggacaaagagggccaggaactgggggtagctcatcttaaagtactttagtatatcgcgacagttgatcgtgggaatgtagcaggcgctaatatccaacacaatatcacagcccatcaacaggaggtcagtgtctgtggtgtacacgtacgcgaccgtgttggtgtgatagaggttggcgcaggcatcgtccgcctccagctgacccgagttaatgtaggcgtaccccagggcccggagaacgcgaatacagaacagatgcgccagacgcagggccggcttcgagggcgcggcggacggcagcgcggctccggacccggccgtcccccgggtccccgaggccagagaggtgccgcgccggcgcatgttggaaaaggcagagctgggtctggagtcggtgatgggggaaggcggtggagaggcgtccacgtcactggcctcctcgtccgtccggcattgggccgtcgtgcgggccaggatggccttggctccaaacacaaccggctccatacaattgaccccgcgatcggtaacgaagatggggaaaagggacttttgggtaaacacctttaataagcgacagaggcagtgtagcgtaatggcctcgcggtcgtaactggggtatcggcgctgatatttgaccaccaacgtgtacatgacgttccacaggtccacggcgatgggggtgaagtacccggccggggccccaaggccctggcgcttgaccagatggtgtgtgtgggcaaacttcatcatcccgaacaaacccatgtcaggtcgattgtaactgcggatcggcctaactaaggcgtggttggtgcgacggtccgggacacccgagcctgtctctctgtgtatggtgacccagacaacaacaccgacacaagaggacaataatccgttaggggacgctctttataatttcgatggcccaactccacgcggattggtgcagcaccctgcatgcgccggtgtgggccaaacttccccccgctcattgcctcttccaaaagggtgtggcctaacgagctgggggcgtatttaatcaggctagcgcggcgggcctgccgtagtttctggctcggtgagcgacggtccggttgcttgggtcccctggctgccagcaaaaccccaccctcgcagcggcatacgccccctccgcgtcccgcacccgagaccccggcccggctgccctcaccaccgaagcccacctcgtcactgtggggtgttcccagcccgcattgggatgacggattcccctggcggtgtggcccccgcctcccccgtggaggacgcgtcggacgcgtccctcgggcagccggaggagggggcgccctgccaggtggtcctgcagggcgccgaacttaatggaatcctacaggcgtttgccccgctgcgcacgagccttctggactcgcttctggttatgggcgaccggggcatccttatccataacacgatctttggggagcaggtgttcctgcccctggaacactcgcaattcagtcggtatcgctggcgcggacccacggcggcgttcctgtctctcgtggaccagaagcgctccctcctgagcgtgtttcgcgccaaccagtacccggacctacgtcgggtggagttggcgatcacgggccaggccccgtttcgcacgctggttcagcgcatatggacgacgacgtccgacggcgaggccgttgagctagccagcgagacgctgatgaagcgcgaactgacgagctttgtggtgctggttccccagggaacccccgacgttcagttgcgcctgacgaggccgcagctcaccaaggtccttaacgcgaccggggccgatagtgccacgcccaccacgttcgagctcggggttaacggcaaattttccgtgttcaccacgagtacctgcgtcacatttgctgcccgcgaggagggcgtgtcgtccagcaccagcacccaggtccagatcctgtccaacgcgctcaccaaggcgggccaggcggccgccaacgccaagacggtgtacggggaaaatacccatcgcaccttctctgtggtcgtcgacgattgcagcatgcgggcggtgctccggcgactgcaggtcgccgggggcaccctcaagttcttcctcacgacccccgtccccagtctgtgcgtcaccgccaccggtcccaacgcggtatcggcggtatttctcctgaaaccccagaagatttgcctggactggctgggtcatagccaggggtctccttcagccgggagctcggcctcccgggcctctgggagcgagccaacagacagccaggactccgcgtcggacgcggtcagccacggcgatccggaagacctcgatggcgctgcccgggcgggagaggcgggggcctcgcacgcctgtccgatgccgtcgtcgaccacgcgggtcactcccacgaccaagcgggggcgctcggggggcgaggatgcgcgcgcggacacggccctaaagaaacctaagacggggtcgcccaccgcacccccgcccacagatccagtccccctggacacggaggacgactccgatgcggcggacgggacggcggcccgtcccgccgctccagacgcccggagcggaagccgttacgcgtgttactttcgcgacctcccgaccggagaagcaagccccggcgccttctccgccttccgggggggcccccaaaccccgtatggttttggattcccctgacggggcggggccttggcggccgcccaactctcgcaccatcccgggttaatgtaaataaacttggtattgcccaacactctcccgcgtgtcgcgtgtggttcatgtgtgtgcctggcgtcccccaccctcgggttcgtgtatttcctttccctgtccttataaaagccgtatgtggggcgctgacggaaccaccccgcgtgccatcacggccaaggcgcgggatgctccgcaacgacagccaccgggccgcgtccccggaggacggccagggacgggtcgacgacggacggccacacctcgcgtgcgtgggggccctggcgcgggggttcatgcatatctggcttcaggccgccacgctgggttttgcgggatcggtcgttatgtcgcgcgggccgtacgcgaatgccgcgtctggggcgttcgccgtcgggtgcgccgtgctgggctttatgcgcgcaccccctcccctcgcgcggcccaccgcgcggatatacgcctggctcaaactggcggccggtggagcggcccttgttctgtggagtctcggggagcccggaacgcagccgggggccccgggcccggccacccagtgcctggcgctgggcgccgcctatgcggcgctcctggtgctcgccgatgacgtctatccgctctttctcctcgccccggggcccctgttcgtcggcaccctggggatggtcgtcggcgggctgacgatcggaggcagcgcgcgctactggtggatcggtgggcccgccgcggccgccttggccgcggcggtgttggcgggcccgggggcgaccaccgccagggactgcttctccagggcgtgccccgaccaccgccgcgtctgcgtcatcgtcgcaggcgagtctgtttcccgccgccccccggaggacccagagcgacccggggaccccgggccaccgtcccccccgacaccccaacgatcccaggggccgccggccgatgaggtcgcaccggccggggtagcgcggcccgaaaacgtctgggtgcccgtggtcacctttctgggggcgggcgcgctcgccgtcaagacggtgcgagaacatgcccgggaaacgccgggcccgggcctgccgctgtggccccaggtgtttctcggaggccatgtggcggtggccctgacggagctgtgtcaggcgcttatgccctgggaccttacggacccgctgctgtttgttcacgccggactgcaggtcatcaacctcgggttggtgtttcggttttccgaggttgtcgtgtatgcggcgctagggggtgccgtgtggatttcgttggcgcaggtgctggggctccggcgtcgcctgcacaggaaggaccccggggacggggccaggttggcggcgacgcttcggggcctcttcttctccgtgtacgcgctggggtttggggtgggggcgctgctgtgccctccggggtcaacgggcgggtggtcgggcgattgatatatttttcaataaaaggcattagtcccgaagaccgccggtgtgtgatgatttcgccataacacccaaaccccggatggggcccgggtataaattccggaaggggacacgggctaccctcactaccgagggcgcttggtcgggaggccgcatcgaacgcacacccccatccggtggtccgtgtggaggtcgtttttcagtgcccggtctcgctttgccgggaacgctagccgatccctcgcgagggggaggcgtcgggcatggccccggggcgggtgggccttgccgtggtcctgtggagcctgttgtggctcggggcgggggtggccgggggctcggaaactgcctccaccgggcccacgatcaccgcgggagcggtgacgaacgcgagcgaggcccccacatcggggtcccccgggtcagccgccagcccggaagtcacccccacatcgaccccaaaccccaacaatgtcacacaaaacaaaaccacccccaccgagccggccagccccccaacaacccccaagcccacctccacgcccaaaagcccccccacgtccacccccgaccccaaacccaagaacaacaccacccccgccaagtcgggccgccccactaaaccccccgggcccgtgtggtgcgaccgccgcgacccattggcccggtacggctcgcgggtgcagatccgatgccggtttcggaattccacccgcatggagttccgcctccagatatggcgttactccatgggtccgtcccccccaatcgctccggctcccgacctagaggaggtcctgacgaacatcaccgccccacccgggggactcctggtgtacgacagcgcccccaacctgacggacccccacgtgctctgggcggagggggccggcccgggcgccgaccctccgttgtattctgtcaccgggccgctgccgacccagcggctgattatcggcgaggtgacgcccgcgacccagggaatgtattacttggcctggggccggatggacagcccgcacgagtacgggacgtgggtgcgcgtccgcatgttccgccccccgtctctgaccctccagccccacgcggtgatggagggtcagccgttcaaggcgacgtgcacggccgccgcctactacccgcgtaaccccgtggagtttgtctggttcgaggacgaccgccaggtgtttaacccgggccagatcgacacgcagacgcacgagcaccccgacgggttcaccacagtctctaccgtgacctccgaggctgtcggcggccaggtccccccgcggaccttcacctgccagatgacgtggcaccgcgactccgtgatgttctcgcgacgcaatgccaccgggctggccctggtgctgccgcggccaaccatcaccatggaatttggggtccggcatgtggtctgcacggccggctgcgtccccgagggcgtgacgtttgcctggttcctgggggacgacccctcaccggcggctaagtcggccgttacggcccaggagtcgtgcgaccaccccgggctggctacggtccggtccaccctgcccatttcgtacgactacagcgagtacatctgtcggttgaccggatatccggccgggattcccgttctagagcaccacggcagtcaccagcccccacccagggaccccaccgagcggcaggtgatcgaggcgatcgagtgggtggggattggaatcggggttctcgcggcgggggtcctggtcgtaacggcaatcgtgtacgtcgtccgcacatcacagtcgcggcagcgtcatcggcggtaacgcgagacccccccgttacctttttaatatctatatagtttggtccccctctatcccgcccaccgctgggcgctataaagccgccaccctctcttccctcaggtcatccttggtcgatcccgaacgacacacggcgtggagcaaaacgcctccccctgagccgctttcctaccaacacaacggcatgcctctgcgggcatcggaacacgcctaccggcccctgggccccgggacaccccccatgcgggctcggctccccgccgcggcctgggttggcgtcgggaccatcatcgggggagttgtgatcattgccgcgttggtcctcgtgccctcgcgggcctcgtgggcactttccccatgcgacagcggatggcacgagttcaacctcgggtgcatatcctgggatccgacccccatggagcacgagcaggcggtcggcggctgtagcgccccggcgaccctgatcccccgcgcggctgccaaacagctggccgccgtcgcacgcgtccagtcggcaagatcctcgggctactggtgggtgagcggagacggcattcgggcctgcctgcggctcgtcgacggcgtcggcggtattgaccagttttgcgaggagcccgcccttcgcatatgctactatccccgcagtcccgggggctttgttcagtttgtaacttcgacccgcaacgcgctggggctgccgtgaggcgcgtgtactgcggtctgtctcgtctcctcttctccccttccctccccctccgcatcccaggatcacaccggccaacgagggttgggggggtccggcacggacccaaaataataaacacacaatcacgtgcgataaaaagaacacgcggtcccctgtggtgtttttggttatttttattaaatctcgtcgacaaacagggggaaaggggcgtggtctagcgacggcagcacgggcggaggcgttcaccggctccggcgtccttcgcgtttaagcttggtcaggagggcgctcagggcggcgacgttggtcgggccgtcgttggtcagggcgttggctcgatggcgggcgaggacgggcgaggggctcaacggcgggggcgggggtccggtgcggcccgggggggaaaatagggcggatcccccccagtcgtacaggggattttccgcctcaatgtacggggaggccggcgctgcattcgccgtgttcacgcagacgttttcgtagacccgcatccatggtatttcctcgtagacacgccccccgtcctcgctcacggtctcgtatattgactcgtcgtcctcgtagggggcgtgccgttcgcgggccgaggcggcgtgggtggctttgcggcgggcgtcgtcgtcgtcgtcgtcggccgtcagatacgtggcttccatctggtcgggttctccctccggggcgggtccccacacccgtggccgatcgaggctccccagagacgcgcgccggacaagaagggggcacgtcgccgccggcggtcgcctgtcgggtcccgcgacgttacgggccgggaggcgcgggggcacctcccccatgtgcgtgtaatacgtggccggctgtgcggccgcagcggggggctcggcgaccgggtcgtccgcatccggaagcgggggccccgcgccgtccgcacggcgcctccggaaccgccgggtggacggcgcgggggtcgagtgtaggcgaggtcgggggaggggcgggggctcgttgtcgcgccgcgcccgctgaatcttttcccgacaggtcccaccccccgcgcgatgcccccccgggccgcgggccatgtcgtccgggggaggccccgcggaccacgtcgtccggcgagacgccacgagccgcaggatggactcgtagtggagcgacggcgccccgctgcggagcagatccgcggccagggcggccccgaaccaagccttgatgctcaactccatccgggcccagctgggggcggtcatcgtggggaacaggggggcggtggtccgacagaaacgctcctggctgtccaccgcggcccgcagatactcgttgttcaggctgtcggtggcccagacgccgtacccggtgagggtcgcgttgatgatatactgggcgtggtgatggacgatcgacagaacctccaccgtggataccacggtatccacggtcccgtacgtaccgccgctccgcttgccggtctgccacaggttggctaggcacgtcaggtggcccaggacgtcgctgaccgccgccctgagcgccatgcactgcatggagccggtcgtgccgctgggaccccggtccagatggcgcgcgaacgtttccgcgggcgcctccgggctgccgccgagcgggaggaaccggcgattggagggactcagccggtgacatacgtgcttgtccgtcgtccacagcatccaggacgcccaccggtacagcacggagacgtaggccaggagctcgttgagccgcagtgcggtgtcggtgctggggcggcttgggtccgccgggcgcataaagaacatgtactgctgaatccgatggagggcgtcgcgcaggccggccacggtggcggcgtacttggccgccgcggccccgctcttgaacggggtgcgcgccagcagctttggcgccagggtgggccgcagcagcacgtgaaggctggggtcgcagtcgcccacggggtcctcggggacgtccaggccgctgggcaccaccgtctgcaggtacttccagtactgcgtgaggatggcgcggctcaactggccgccgggcagctccacctcgcccagcgcctgggtggcggccgaagcgtagtgccggatgtactcgtagtgcgggtcgctggcgagcccgtccacgatcaaactctcgggaaccgtgttgtgttgccgcgcggccaaccggacgctgcgatcggtgcaggtcagaaacgccggctgcgcgtcgtcggagcgctgccgcaaggcgcccacggccgcgctaaggagcccctccggggtggggagcagacacccgccgaagatgcgccgctcgggaacgcccgcgttgtcgccgcggatcaggttggcaggcgtcaggcaccgcgccagccgcagggagctcgcgccgcgcgtccggcgctgcatggtgacgcccgttcggtcgggacccgccggtcggagttatgccgcgtccagggccatcggggcgctttttatcgggaggagcttatgggcgtggcgggcctcccagcccggtcgcgcgcctccccgacacgtgcgcccgcagggcggcggccccctcgtctcccatcagcagtttcctaaactgggacatgatgtccaccacgcggacccgcgggcccaacacggacccgccgcttacgggggcgggggggaagggctccaggtccttgagcagaaaggcggggtctgccgtcccggacacgggggcccggggcgcggaggaggcggggcgcagatccacgtgctccgcggccgcgcggacgtccgcccagaacttggcgggggtggtgcgcgcgtacaggggctgggtcgctcggaggacacacgcgtagcgcaggggggtgtacgtgcccacctcgggggccgtgaatcccccgtcaaacgcggccagtgtcacgcacgccaccacggtgtcggcaaagcccagcagccgctgcaggacgagcccggcggccagaatggcgcgcgtggtcgcagcgtcgtcccggcgccggtgcgcgtccccgcacgcccgggcgtactttaaggtcactgtcgccagggccgtgtgcagcgcgtacaccgcagcgcccagcacggcgttgagcccgctgttggcgagcagccggcgcgctgcggtgtcgcccagcgcctcgtgctcggcccccacgaccgcggggcttcccaggggcagggcgcgaaacagctcctcccgcgccacgtccgcaaaggcggggtggtgcacgtgcgggtgcaggcgcgcccccacgaccaccgagagccactggaccgtctgctccgccatcaccgccaacacatccagcacgcgccccaggaaggcggcctcccgcgtcaaaacgcaccggacggcgtcgggattgaagcgggcgagcagggccccggtggccaggtacgtcatgcggccggcatagcgggcggccacgcgacagtcgcggtccagcagcgcgcgcaccccgggccagtacagcagggaccccagcgagctgcgaaacaccgcggcgtcggggccggattggggggacactaacccccccgcgctcagtaacggcacggccgcggccccgacgggacgcaacgccgtgaggctcgcgaactgccgcctcagctcggcagccctgtcgtccaggtccgacccgcgcgcctctgcgtgaaggcgcgtcccgcacacccacccgttgatggccagccgcacgacggcatccgccaaaaagctcatcgcctgggcggggctggtttttgttcgacgatccgtcaggtcaagaatcccatcgcccgtgatataccaggccaacgcctcgccctgctgcagggtttggcggaaaaacaccgcggggttgtcgggggaggcgaagtgcatgacccccacgcgcgataacccgaacgcgctatccggacacgggtaaaacccggccggatgccccagggctagggcggagcgcacggactcgtcccacacggcaacctgaggggccagtcgatccaacgggaatgccgcccggagctccgggcccggcacgcgtccctccagaacctccaccttgggcggggaacgggccccgccgccgtcctccggcccgacgtcttccgggtagtcgtcctcctcgtactgcagttcctctaggaacagcggcgacggcgccacccgcgaaccgccgacccgccccaaaatagcccgcgcgtcgacgggacccaggtatcccccctgccgggcctgcggaggaccgcggggaacctcatcatcatcgtccaggcgaccgcgcaccgactggctacgggccgcatcgggcccggggcgctgccgggacgctcggcgatgggatgagggcggggcttccgacgcgcgccgtcgtcgggctcgcgggccttcccgtcgacggcgcacgggcggctcgtcgcccgccatctcctccagagcctctagctcgctgtcgtcatccccgcggaacaccgcacgcaggtaccccatgaaccccaccccatcgcccgctggctcgtccgccacgggcgaggcgcgggggcgggtggatgcgcgcctcctgcgccccgcgggttcgcgagccgacatggtggcgatagacgcgggttatcggatgtccgctaccccccaaaaaagaaaaagaccccacagcgcggatggaggtcggggtaggtgccgccggaccccctcgcgatgggaatggacgggagcgacggggccggcgcaaaaaacgcagtatctcccgcgaaggctacccgccgccccagcccccggccaaatgcggaaacggtcccgcgctctcgcctttatacgcgggccgccctgcgacacaatcacccgtccgtggtttcgaatctacacgacaggcccgcagacgcggctaacacacacgccggcaacccagaccccagtgggttggttgcgcggtcccgtctcctggctagttctttcccccaccaccaaataatcagacgacaaccgcaggtttttgtaatgtatgtgctcgtgtttattgtggatacgaaccggggacgggaggggaaaacccagacgggggatgcgggtccggtcgcgccccctatgggtggggttgatacgggaaagacgatatcgggcttttgatgcgatcgtccccgcccgcccagagagtgtgggacgcccgacggcgcgggaagagaaaaacccccaaacgcgttagaggaccggacggaccttatggggggaagtgggcagcgggaaccccgtccgttcccgaggaatgacagcccgtggtcgccaccccgcatttaagcaacccgcacgggccgccccgtacctcgtgacttccccccacattggctcctgtcacgtgaaggcaaaccgagggcggctgtccaacccaccccccgccacccagtcacggtccccgtcggattgggaaacaaaggcacgcaacgccaacaccgaatgaacccctgttggtgctttattgtctgggtacggaagtttttcactcgacgggccgtctggggcgagaagcggagcgggctggggctcgaggtcgctcggtggggcgcgacgccgcagaacgccctcgagtcgccgtggccgcgtcgacgtcctgcaccacgtctggattcaccaactcgttggcgcgctgaatcaggtttttgccctcgcagaccgtcacgcggatggtggtgatgccaaggagttcgttgaggtcttcgtctgtgcgcggacgcgacatgtcccagagctggaccgccgccatccgggcatgcatggccgccaggcgcccaaccgcggcgcagaagacgcgcttgttaaagccggccacccggggggtccatggcgcgtcggggtttgggggggcggtgctaaagtgcagctttctggccagcccctgcgcgggtgtcttggatcgggttggcgccgtcgacgcgggggcgtctgggagtgcggcggattctggctgggccgatttcctgccgcgggtggtctccgccgccggggccgcgggggccttagtcgccacccgctgggttcggggggcccggggggcggtggtgggtgtgcgtccggcccctccggacccagcgggcggcggaggcgcccgcgcaggccccggggcggacaaaaccgccccggaaacgggacgccgcgtccgggggacctccgggtgttcgtcgtcttcggatgacgagcccccgtagagggcataatccgactcgtcgtactggacgaaacggacctcgccccttgggcgcgcgcgtgtctgtagggcgccacggcgggaggtgtcaggcggactatcgggactcgccatacatgaagacggggtgtagtacagatcctcgtactcatcgcgcggaacctcccgcggacccgacttcacggagcggcgagaggtcatggttccacgaacacgctagggtcggatgcgcggacaattaggcctgggttcggacggcgggggtggtgcaggtgtggagaggtcgagcgataggggcggcccgggagagaagagagggtccgcaaaacccactggggatgcgtgagtggccctctgtgggcggtgggggagagtcttataggaagtgcatataaccacaacccatgggtctaaccaatccccaggggccaagaaacagacacgccccaaacggtctcggtttccgcgaggaaggggaagtcctgggacaccctccacccccacccctcaccccacacagggcgggttcaggcgtgcccggcagccagtagcctctggcagatctgacagacgtgtgcgataatacacacgcccatcgaggccatgcctacataaaagggcaccagggcccccggggcagacatttggccagcgttttgggtctcgcaccgcgcgcccccgatcccatcgcgcccgccctcctcgccgggcggctccccgtgcgggcccgcgtctcccgccgctaaggcgacgagcaagacaaacaacaggcccgcccgacagacccttctgggggggcccatcgtccctaacaggaagatgagtcagtggggatccggggcgatccttgtccagccggacagcttgggtcgggggtacgatggcgactggcacacggccgtcgctactcgcgggggcggagtcgtgcaactgaacctggtcaacaggcgcgcggtggcttttatgccgaaggtcagcggggactccggatgggccgtcgggcgcgtctctctggacctgcgaatggctatgccggctgacttttgtgcgattattcacgcccccgcgctatccagcccagggcaccacgtaatactgggtcttatcgactcggggtaccgcggaaccgttatggccgtggtcgtagcgcctaaaaggacgcgggaatttgcccccgggaccctgcgggtcgacgtgacgttcctggacatcctggcgacccccccggccctcaccgagccgatttccctgcggcagttcccgcaactggcgcccccccctccaaccggggccgggatacgcgcagatccttggttggagggggcgctcggggacccaagcgtgactcctgccctaccggcgcgacgccgagggcggtccctcgtctatgccggcgagctgacgccggttcagacggaacacggggacggcgtacgagaagccatcgccttccttccaaaacgcgaggaggatgccggtttcgacattgtcgtccgtcgcccggtcaccgtcccggcaaacggcaccacggtcgtgcagccatccctccgcatgctccacgcggacgccgggcccgcggcctgctatgtgctggggcggtcgtcgctcaacgcccgcggcctcctggtcgttcctacgcgctggctccccgggcacgtatgtgcgtttgttgtttacaaccttacgggggttcctgtgaccctcgaggccggcgccaaggtcgcccagctcctggttgcgggggcggacgctcttccttggatccccccggacaactttcacgggaccaaagcgcttcgaaactaccccaggggtgttccggactcaaccgccgaacccaggaacccgccgctcctggtgtttacgaacgagtttgacgcggaggcccccccgagcgagcgcgggaccgggggttttggctctaccggtatttagcccatagcttggggttcgttccgggcaataaaaaacgtttgtatctcatctttcctgtgtgtagttgtttctgttggatgcctgtgggtctatcacacccgcccctccatcccacaaacacagaacacacgggttggatgaaaacacgcatttattgacccaaaacacacggagctgctcgagatgggccagggcgaggtgcggttggggaggctgtaggtctgggaacggacacgcggggacacgattccggtttggggtccgggagggcgtcgccgtttcgggcggcaggcgccagcgtaacctccgggggcggcgtgtgggggtgccccaaggagggcgcctcggtcaccccaagcccccccgagcgggttcccccggcaaccccgaaggcggagaggccaagggcccgttcggcgatggccacatcctccatgaccacgtcgctctcggccatgctccgaatagcctgggagacgagcacatccgcggacttgtcagccgcccccacggacatgtacatctgcaggatggtggccatacacgtgtccgccaggcgccgcatcttgtcctgatgggccgccacggccccgtcgatcgtgggggcctcgagcccggggtggtggcgcgccagtcgttctaggttcaccatgcaggcgtggtacgtgcgggccaaggcgcgggccttcacgaggcgtcgggtgtcgtccagggaccccagggcgtcatcgagcgtgatgggggcgggaagtagcgcgttaacgaccaccagggcctcctgcagccgcggctccgcctccgagggcggaacggccgcgcggatcatctcatattgttcctcggggcgcgctccccagccacatatagccccgagaagagaagccatcgcgggcgggtactggcccttgggcgcgcggacgcaatggggcaggaagacgggaaccgcggggagaggcgggcggccgggactcccgtggaggtgaccgcgctttatgcgaccgacgggtgcgttattacctcttcgatcgccctcctcacaaactctctactgggggccgagccggtttatatattcagctacgacgcatacacgcacgatggccgtgccgacgggcccacggagcaagacaggttcgaagagagtcgggcgctctaccaagcgtcgggcgggctaaatggcgactccttccgagtaaccttttgtttattggggacggaagtgggtgggacccaccaggcccgcgggcgaacccgacccatgttcgtctgtcgcttcgagcgagcggacgacgtcgccgcgctacaggacgccctggcgcacgggaccccgctacaaccggaccacatcgccgccaccctggacgcggaggccacgttcgcgctgcatgcgaacatgatcctggctctcaccgtggccgtcaacaacgccagcccccgcaccggacgcgacgccgccgcggcgcagtatgatcagggcgcgtccctacgctcgctcgtggggcgcacgtccctgggacaacgcggccttaccacgctatacgtccaccacgaggcgcgcgtgctggccgcgtaccgcagggcgtattatggaagcgcgcagagtcccttctggtttcttagcaaattcgggcctgacgaaaaaagcctggtgctcaccactcggtactacctgcttcaggcccagcgtctggggggcgcgggggccacgtacgacctgcaggccatcaaggacatctgcgccacctacgcgattccccacgccccccgccccgacaccgtcagcgccgcgtccctgacctcgtttgccgccatcacgcggttctgttgcacgagccagtacgcccgcggggccgcggcggccgggtttccgctttacgtggagcgccgtattgcggccgacgtccgcgagaccagtgcgctggagaagttcataacccacgatcgcagttgcctgcgcgtgtccgaccgtgaattcattacgtacatttacctggcccattttgagtgtttcagccccccgcgcctagccacgcatcttcgggccgtgacgacccaggaccccaaccccgcggccaacacggagcagccctcgcccctgggcagggaggccgtggaacaatttttttgccacgtgcgcgcccaactgaatatcggggagtacgtcaaacacaacgtgaccccccgggagaccgtcctggatggcgatacggccaaggcctacctgcgcgctcgcacgtacgcgcccggggccctgacgcccgcccccgcgtattgcggggccgtggactccgccaccaaaatgatggggcgtttggcggacgccgaaaagctcctggtcccccgcgggtggcccgcgtttgcgcccgccagtcccggggaggatacggcgggcggcacgccgcccccacagacctgcggaatcgtcaagcgcctcctgagactggccgccacggaacaacaggacaccacgcccccggcgatcgcggcgcttatccgtaatgcggcggtgcagactcccctgcccgtctaccggatatccatggtccccacgggacaggcatttgccgcgctggcctgggacgactgggcccgcataacgcgggacgctcgcctggccgaagcggtcgtgtccgccgaagcggcggcgcaccccgaccacggcgcgctgggcaggcggctcacggatcgcatccgcgcccagggccccgtgatgccccctggcggcctggatgccggggggcagatgtacgtgaatcgcaacgagatatttaacggcgcgctggcaatcacaaacatcatcctggatctcgacatcgccctgaaggagcccgtcccctttcgccggctccacgaggccctgggccactttaggcgcggggctctggcggcggttcagctcctgtttcccgcggcccgcgtggaccccgacgcatatccctgttattttttcaaaagcgcatgtcggcccggcccggcgtccgtgggttccggcagcggactcggcaacgacgacgacggggactggtttccctgctacgacgacgccggtgatgaggagtgggcggaggacccgggcgccatggacacatcccacgatcccccggacgacgaggttgcctactttgacctgtgccacgaagtcggccccacggcggaacctcgcgaaacggattcgcccgtgtgttcctgcaccgacaagatcggactgcgggtgtgcatgcccgtccccgccccgtacgtcgtccacggttctctaacgatgcggggggtggcacgggtcatccagcaggcggtgctgttggaccgagattttgtggaggccatcgggagctacgtaaaaaacttcctgttgatcgatacgggggtgtacgcccacggccacagcctgcgtttgccgtattttgccaaaatcgcccccgacgggcctgcgtgcggaaggctgctgccagtgtttgtgatcccccccgcctgcaaagacgttccggcgtttgtcgccgcgcacgccgacccgcggcgcttccattttcacgccccgcccacctatctcgcttccccccgggagatccgtgtcctgcacagcctgggtggggactatgtgagcttctttgaaaggaaggcgtcccgcaacgcgctggaacactttgggcgacgcgagaccctgacggaggtcctgggtcggtacaacgtacagccggatgcgggggggaccgtcgaggggttcgcatcggaactgctggggcggatagtcgcgtgcatcgaaacccactttcccgaacacgccggcgaatatcaggccgtatccgtccggcgggccgtcagtaaggacgactgggtcctcctacagctagtccccgttcgcggtaccctgcagcaaagcctgtcgtgtctgcgctttaagcacggccgggcgagtcgcgccacggcgcggacattcgtcgcgctgagcgtcggggccaacaaccgcctgtgcgtgtccttgtgtcagcagtgctttgccgccaaatgcgacagcaaccgcctgcacacgctgtttaccattgacgccggcacgccatgctcgccgtccgttccctgcagcacctctcaaccgtcgtcttgataacggcgtacggcctcgtgctcgtgtggtacaccgtcttcggtgccagtccgctgcaccgatgtatttacgcggtacgccccaccggcaccaacaacgacaccgccctcgtgtggatgaaaatgaaccagaccctattgtttctgggggccccgacgcacccccccaacgggggctggcgcaaccacgcccatatctgctacgccaatcttatcgcgggtagggtcgtgcccttccaggtcccacccgacgccacgaatcgtcggatcatgaacgtccacgaggcagttaactgtctggagaccctatggtacacacgggtgcgtctggtggtcgtagggtggttcctgtatctggcgttcgtcgccctccaccaacgccgatgtatgtttggtgtcgtgagtcccgcccacaagatggtggccccggccacctacctcttgaactacgcaggccgcatcgtatcgagcgtgttcctgcagtacccctacacgaaaattacccgcctgctctgcgagctgtcggtccagcggcaaaacctggttcagttgtttgagacggacccggtcaccttcttgtaccaccgccccgccatcggggtcatcgtaggctgcgagttgatgctacgctttgtggccgtgggtctcatcgtcggcaccgctttcatatcccggggggcatgtgcgatcacataccccctgtttctgaccatcaccacctggtgttttgtctccaccatcggcctgacagagctgtattgtattctgcggcggggcccggcccccaagaacgcagacaaggccgccgccccggggcgatccaaggggctgtcgggcgtctgcgggcgctgttgttccatcatcctgtcgggcatcgcaatgcgattgtgttatatcgccgtggtggccggggtggtgctcgtggcgcttcactacgagcaggagatccagaggcgcctgtttgatgtatgacgtcacatccaggccggcggaaaccggaacggcatatgcaaactggaaactgtcctgtcttggggcccacccacccgacgcgtcatatgtaaatgaaaatcgttcccccgaggccatgtgtagcctggatcccaacgaccccgcccatgggtcccaattggccgtcccgttaccaagaccaacccagccagcgtatccacccccgcccgggtccccgcggaagcggaacggtgtatgtgatatgctaattaaatacatgccacgtacttatggtgtctgattggtccttgtctgtgccggaggtggggcgggggccccgcccggggggcggaactaggaggggtttgggagagccggccccggcaccacgggtataaggacatccaccacccggccggtggtggtgtgcagccgtgttccaaccacggtcacgcttcggtgcctctccccgattcgggcccggtcgcttgctaccggtgcgccaccaccagaggccatatccgacaccccagccccgacggcagccgacagcccggtcgtacaataaaaacaaaacatttcaaacaaatcgccccacgtgttgtccttctttgctcatggccggcggggcgtgggtcacggcagatggcgggggtgggcccggcgtacggcctgggtgggcggagggaactaacccaacgtataaatccgtccccgctccaaggccggtgtcatagtgcccttaggagcttcccgcccgggcgcatccccccttttgcactatgacagcgacccccctcaccaacctgttcttacgggccccggacataacccacgtggcccccccttactgcctcaacgccacctggcaggccgaaacggccatgcacaccagcaaaacggactccgcttgcgtggccgtgcggagttacctggtccgcgcctcctgtgagaccagcggcacaatccactgctttttctttgcggtatacaaggacacccaccatacccctccgctgattaccgagctccgcaactttgcggacctggttaaccacccgccggtcctacgcgaactggaggataagcgcggggtgcggctgcggtgtgcgcggccgtttagcgtcgggacgattaaggacgtctctgggtccggcgcgtcctcggcgggagagtacacgataaacgggatcgtgtaccactgccactgtcggtatccgttctcaaaaacatgctggatgggggcctccgcggccctacagcacctgcgctccatcagctccagcggcatggccgcccgcgcggcagagcatcgacgcgtcaagattaaaattaaggcgtgatctccaaccccccatgaatgtgtgtaaccccccccccaaaaaaataaagagccgtaacccaaccaaaccaggcgtggtgtgagtttgtggacccaaagccctcagagacaatgcgacaggccagtatggaccgtgatacttttatttattaactcacaggggcgcttaccgccacaggaataccagaataatgaccaccacaatcgcgaccaccccaaatacagcatggcgccacaccacgccacaacagccctgtcgccggtatggggcatgatcagacgagccgcgcgccgcgcgttgggccctgtacagctcgcgcgaattgaccctaggaggccgccacgcgcccgagttttgcgttcgtcgctggtcgtcgggcgccaaagccccggacggctgttcggtcgaacgaacggccacgacagtggcataggttggggggtggtccgacatagcctcggcgtacgtcgggaggcccgacaagaggtcccttgtgatgtcgggtggggccacaagcctggtttccggaagaaacaggggggttgccaataacccgccagggccaaaactccggcgctgcgcacgtcgttcggcgcggcgccgggcgcgccgagcggctcgctgggcggcttggcgtgagcggccccgctccgacgcctcgccctctccggaggaggttggcggaattggcacggacgacaggggcccagcagagtacggtggaggtgggtccgtgggggtgtccagatcaataacgacaaacggcccctcgttcctaccagacaagctatcgtaggggggcgggggatcagcaaacgcgttccccgcgctccatagacccgcgtcgggttgcgccgcctccgaagccatggatgcgccccaaagccacgactcccgcgcgctaggtccttggggtaagggaaaaggccctactccccatccaagccagccaagttaacgggctacgccttcggggatgggactggcaccccggcggattttgttgggctggtacgcgtcgcccaaccgagggccgcgtccacgggacgcgccttttataaccccgggggtcattcccaacgatcacatgcaatctaacgagtcttcggacctcgcgggggccgcttaagcggtggttagggtttgtctgacgcggggggagggggaaggaacgaaacactctcattcggaggcagctcggggtttggtcttggtggccacgggcacgcagaagagcgccgcgatcctcttaagcacccccccgccctccgtggaggcgggggtttggtcggcgggtggtacctggcgggccgctggctcgggcgggtcgcgcgccccagagtgtgaccttttcggtctgctcgcagacccccgggcagcgccgccgcggcggcgacgggctcgctgggtcctaggctccatggggaccgtatacgtggacaggctctggagcatccgcacgactgcggtgatattaccggagaccttctgcgggacgagccgggtcacgcggctgacgcggagcgtccgttgggcgacaaacaccaggacggggcacaggtacactatcttgtcacccggaggcgcgagggactgcaggagcttcagggagtggcgcagctgcttcatccccgtggcccgttgctcgcgtttgctggcggtgtccccggaagaaatatatttgcatgtctttagttctatgatgacacaaaccccgcccagcgtcttgtcattggcgaattcgaacacgcagatgcagtcggggcggcgcggtcccaggtccacttcgcatattaaggtgacgcgtgtggcctcgaacaccgagcgaccctgcagcgacccgcttaaaccggtccgccttttttgcacgggtaagcaccttgggtgggcggaggaggggggacgcgggggcggaggaggggggacgcgggggcggaggaggggggacgcgggggcggaggaggggggacgcgggggcggaggaggggggacgcggggggcggaggaggggggacgcagggggcggaggagggggctcacccgcgttcgtgccttcccgcaggaggaacgccctcgtcgaggcgaccggcggcgaccgttgcgtggaccgcttcctgctcgtcggggggggagccactgtggtcctccgggacgttttctggatggccgacatttccccaggcgcttttgtgccttgtgtaaaagcgcggcgtcccgctctccgatccccgcccctgggcacgcgcaagcgcaagcgccctgcccgccccctctcatcggagtctgaggtcgaatccgagacagccttggagtctgaggtcgaatccgagacagcatcggattcgaccgagtctggggaccaggaggaagccccccgcatcggtggccgtagggccccccggaggcttggggggcggttttttctggacatgtcggcggaatccaccacggggacggaaacggatgcgtcggtgtcggacgaccccgacgacacgtccgactggtcttgtgacgacattcccccacgacccaagcgggcccgggtaaacctgcggctcactagctctcccgatcggcgggatggggttatttttcctaagatggggcgggtccggtctacccgggaaacgcagccccgggcccccaccccgtcggccccaagcccaaatgcaatgctccggcgctcggtgcgccaggcccagaggcggagcagcgcacgatggacccccgacctgggctacatgcgccagtgtatcaatcagctgtttcgggtcctgcgggtcgcccgggacccccacggcagtgccaaccgcctgcgccacctgatacgcgactgttacctgatgggatactgccgagcccgtctggccccgcgcacgtggtgccgcttgctgcaggtgtccggcggaacctggggcatgcacctgcgcaacaccatacgggaggtggaggctcgattcgacgccaccgcagaacccgtgtgcaagcttccttgtttggaggccagacggtacggcccggagtgtgatcttagtaatctcgagattcatctcagcgcgacaagcgatgatgaaatctccgatgccaccgatctggaggccgccggttcggaccacacgctcgcgtcccagtccgacacggaggatgccccctcccccgttacgctggaaaccccagaaccccgcgggtccctcgctgtgcgtctggaggatgagtttggggagtttgactggaccccccaggagggctcccagccctggctgtctgcggtcgtggccgataccagctccgtggaacgcccgggcccatccgattctggggcgggtcgcgcagcagaagaccgcaagtgtctggacggctgccggaaaatgcgcttctccaccgcctgcccctatccgtgcagcgacacgtttctccggccgtgagtccggtcgccccgacccccttgtatgtccccaaaataaaagaccaaaatcaaagcgtttgtcccagcgtcttaatggcgggaagggcggagagaaacagaccacgcgtacatggggggtgtttgggggtttattgacatcggggctacagggtggtaaccggatagcagatgtgaggaagtctgggccgttcgccgcgaacggcgatcagagggtccgtttcttgcggaccacggcccggtgatgtgggttgctcgtctaaaatctcgggcatacccatacacgcacaacacggacgccgcaccgaatgggacgtcgtaagggggtgggaggtagctgggtggggtttgtgcagagcaatcagggaccgcagccagcgcatacaatcgcgctcccgtccgttggtcccgggcaggaccacgccgtactggtattcgtaccggctgagcagggtctccagggggtggttgggtgccgcggggaacggggtccacgccacggtccactcgggcaaaaaccgagtcggcacggcccacggttctcccacccacgcgtctggggtcttgatggcgataaatcttaccccgagccggattttttgggcgtattcgagaaacggcacacacagatccgccgcgcctaccacccacaagtggtagaggcgaggggggctgggttggtctcggtgcaacagtcggaagcacgccacggcgtccacgacctcggtgctctccaaggggctgtcctccgcaaacaggcccgtggtggtgtttggggggcagcgacaggacctagtgcgcacgatcgggcgggtgggtttgggtaagtccatcagcggctcggccaaccgtcgaaggttggccgggcgaacgacgaccggggtacccaggggttctgatgccaaaatgcggcactgcctaagcaggaagctccacagggccgggcttgcgtcgacggaagtccggggcagggcgttgttctggtcaaggagggtcattacgttgacgacaacaacgcccatgttggtatattacaggcccgtgtccggtttggggcacttgcagatttgtaaggccacgcacggcggggagacaggccgacgcgggggctgctctaaaaatttaagggccctacggtccacagacccgccttcccgggggggcccttggagcgaccggcagcggaggcgtccgggggaggggagggttatttacgggggggtaggtcagggggtgggtcgtcaaactgccgctccttaaaaccccggggcccgtcgttcggggtgctcgttggttggcactcacggtgcggcgaatggcctgtcgtaagttttgtcgcgtttacgggggacagggcaggaggaaggaggaggccgtcccgccggagacaaagccgtcccgggtgtttcctcatggccccttttataccccagccgaggacgcgtgcctggactccccgcccccggagacccccaaaccttcccacaccacaccacccggcgatgccgagcgcctgtgtcatctgcaggagatcctggcccagatgtacggaaaccaggactaccccatagaggacgaccccagcgcggatgccgcggacgatgtcgacgaggacgccccggacgacgtggcctatccggaggaatacgcagaggagctttttctgcccggggacgcgaccggtccccttatcggggccaacgaccacatccctcccccgcgtggcgcatctccccccggtatacgacgacgcagccgggatgagattggggccacgggatttaccgcagaagagctggacgccatggacaggcaggcggctcgagccatcagccgcggcggcaagcccccctcgaccatggccaagctggtgactggcatgggctttacgatccacggagcgctcaccccaggatcggaggggtgtgtctttgacagcagccacccagattacccccaacgggtaatcgtgaaggcggggtggtacacgagcacgagccacgaggcgcgactgctgaggcgactggaccacccggcgatcctgcccctcctggacctgcatgtcgtctccggggtcacgtgtctggtcctccccaagtaccaggccgacctgtatacctatctgagtaggcgcctgaacccactgggacgcccgcagatcgcagcggtctcccggcagctcctaagcgccgttgactacattcaccgccagggcattatccaccgcgacattaagaccgaaaatatttttattaacacccccgaggacatttgcctgggggactttggtgccgcgtgcttcgtgcagggttcccgatcaagccccttcccctacggaatcgccggaaccatcgacaccaacgcccccgaggtcctggccggggatccgtataccacgaccgtcgacatttggagcgccggtctggtgatcttcgagactgccgtccacaacgcgtccttgttctcggccccccgcggccccaaaaggggcccgtgcgacagtcagatcacccgcatcatccgacaggcccaggtccacgttgacgagttttccccgcatccagaatcgcgcctcacctcgcgctaccgctcccgcgcggccgggaacaatcgcccgccttacacccgaccggcctggacccgctactacaagatggacatagacgtcgaatatctggtttgcaaagccctcaccttcgacggcgcgcttcgccccagcgccgcagagctgctttgtttgccgctgtttcaacagaaatgaccgcccccggggggcggtgctgtttgcgggttggcacaaaaagaccccgacccgcgtctgtggtgtttttggcatcatgtcgccgggcgccatgcgtgccgttgttcccattatcccattccttttggttcttgtcggtgtatcgggggttcccaccaacgtctcctccaccacccaaccccaactccagaccaccggtcgtccctcgcatgaagcccccaacatgacccagaccggcaccaccgactctcccaccgccatcagccttaccacgcccgaccacacaccccccatgccaagtatcggactggaggaggaggaggaagaggaggagggggccggggatggcgaacatcttaaggggggagatgggacccgtgacaccctaccccagtccccgggtccagccgtcccgttggccggggatgacgagaaggacaaacccaaccgtcccgtagtcccaccccccggtcccaacaactcccccgcgcgccccgagaccagtcgaccgaagacaccccccaccagtatcgggccgctggcaactcgacccacgacccaactcccctcaaaggggcgacccttggttccgacgcctcaacataccccgctgttctcgttcctcactgcctcccccgccctggacaccctcttcgtcgtcagcaccgtcatccacaccttatcgtttgtgtgtattgttgctatggcgacacacctgtgtggtggttggtccagacgcgggcgacgcacacaccctagcgtgcgttacgtgtgcctgccgcccgaacgcgggtagggtatggggcggggatggggagagcccacacgcggaaagcaagaacaataaaggcggcgggatctagttgatatgcgtctctgggtgtttttggggtgtggtgggcgcggggcggtcattggacgggggtgcagttaaatacatgcccgggacccatgaagcatgcgcgacttccgggcctcggaacccacccgaaacggccaacggacgtctgagccaggcctggctatccggagaaacagcacacgacttggcgttctgtgtgtcgcgatgtctctgcgcgcagtctggcatctggggcttttgggaagcctcgtgggggctgttcttgccgccacccatctgggacctgcggccaacacaacggaccccttaacgcacgccccagtgtcccctcaccccagccccctggggggctttgccgtccccctcgtagtcggtgggctgtgtgccgtagtcctgggggcggcgtgtctgcttgagctcctgcgtcgtacgtgccgcgggtgggggcgttaccatccctacatggacccagttgtcgtataattttttcccccccccccttctccgcatgggtgatgtcgggtccaaactcccgacaccaccagctggcatggtataaatcaccggtgcgccccccaaaccatgtccggcagggggatggggggcgaatgcggagggcacccaacaacaccgggctaaccaggaaatccgtggccccggcccccaacaaagatcgcggtagcccggccgtgtgacattatcgtccataccgaccacaccgacgaatcccctaagggggaggggccattttacgaggaggaggggtataacaaagtctgtctttaaaaagcaggggttagggagttgttcggtcataagcttcagtgcgaacgaccaactaccccgatcatcagttatccttaaggtctcttttgtgtggtgcgttccggtatggggggggctgccgccaggttgggggccgtgattttgtttgtcgtcatagtgggcctccatggggtccgcggcaaatatgccttggcggatgcctctctcaagatggccgaccccaatcgctttcgcggcaaagaccttccggtcctggaccagctgaccgaccctccgggggtccggcgcgtgtaccacatccaggcgggcctaccggacccgttccagccccccagcctcccgatcacggtttactacgccgtgttggagcgcgcctgccgcagcgtgctcctaaacgcaccgtcggaggccccccagattgtccgcggggcctccgaagacgtccggaaacaaccctacaacctgaccatcgcttggtttcggatgggaggcaactgtgctatccccatcacggtcatggagtacaccgaatgctcctacaacaagtctctgggggcctgtcccatccgaacgcagccccgctggaactactatgacagcttcagcgccgtcagcgaggataacctggggttcctgatgcacgcccccgcgtttgagaccgccggcacgtacctgcggctcgtgaagataaacgactggacggagattacacagtttatcctggagcaccgagccaagggctcctgtaagtacgccctcccgctgcgcatccccccgtcagcctgcctctccccccaggcctaccagcagggggtgacggtggacagcatcgggatgctgccccgcttcatccccgagaaccagcgcaccgtcgccgtatacagcttgaagatcgccgggtggcacgggcccaaggccccatacacgagcaccctgctgcccccggagctgtccgagacccccaacgccacgcagccagaactcgccccggaagaccccgaggattcggccctcttggaggaccccgtggggacggtggcgccgcaaatcccaccaaactggcacatcccgtcgatccaggacgccgcgacgccttaccatcccccggccaccccgaacaacatgggcctgatcgccggcgcggtgggcggcagtctcctggcagccctggtcatttgcggaattgtgtactggatgcaccgccgcactcggaaagccccaaagcgcatacgcctcccccacatccgggaagacgaccagccgtcctcgcaccagcccttgttttactagatacccccccttaatgggtgcgggggggtcaggtctgcggggttgggatgggaccttaactccatataaagcgagtctggaaggggggaaaggcggacagtcgataagtcggtagcgggggacgcgcacctgttccgcctgtcgcacccacagctttttcgcgaaccgtcccgtttcgggatgccgtgccgcccgttgcagggcctggtgctcgtgggcctctgggtctgtgccaccagcctggttgtccgtggccccacggtcagtctggtatcaaactcatttgtggacgccggggccttggggcccgacggcgtagtggaggaagacctgcttattctcggggagcttcgctttgtgggggaccaggtcccccacaccacctactacgatggggtcgtagagctgtggcactaccccatgggacacaaatgcccacgggtcgtgcatgtcgtcacggtgaccgcgtgcccacgtcgccccgccgtggcatttgccctgtgtcgcgcgaccgacagcactcacagccccgcatatcccaccctggagctgaatctggcccaacagccgcttttgcgggtccggagggcgacgcgtgactatgccggggtgtacgtgttacgcgtatgggtcggggacgcaccaaacgccagcctgtttgtcctggggatggccatagccgccgaaggtactctggcgtacaacggctcggcccatggctcctgcgacccgaaactgcttccgtcttcggccccgcgtctggccccggcgagcgtataccaacccgcccctaacccggcctccaccccctcgaccaccacctccaccccctcgaccaccatccccgctccccaagcatcgaccacacccttccccacgggagacccaaaaccccaacctcacggggtcaaccacgaacccccatcgaatgccacgcgagcgacccgcgactcgcgatatgcgctaacggtgacccagataatccagatagccatccccgcgtccattatagccctggtgtttctggggagctgtatttgctttatacacagatgtcaacgccgctaccgacgctcccgccgcccgatttacagcccccagatacccacgggcatctcatgcgcggtgaacgaagcggccatggcccgcctcggagccgagctcaaatcgcatccgagcaccccccccaaatcccggcgccggtcgtcacgcacgccaatgccctccctgacggccatcgccgaagagtcggagcccgcgggggcggctgggcttccgacgccccccgtggaccccacgacatccaccccaacgcctcccctgttggtataggtccacggccactggccgggggcaccacataaccgaccgcagtcactgagttgggaataaaccggtattatttacctatatccgtgtatgtccatttctttcttcccccccccccccggaaaccaaagaaggaagcaaagaatggatgggaggagttcaggaagccggggagagggcccgcggcgcatttaaggcgttgttgtgttgactttggctcttctggcgggttggtgcggtgctgtttgttgggctcccattttacccgaagatcggctgctatccccgggacatggatcgcggggcggtggtggggtttcttctcggtgtttgtgttgtatcgtgcttggcgggaacgcccaaaacgtcctggagacgggtgagtgtcggcgaggacgtttcgttgcttccagctccggggcctacggggcgcggcccgacccagaaactactatgggccgtggaacccctggatgggtgcggccccttacacccgtcgtgggtctcgctgatgccccccaagcaggtgcccgagacggtcgtggatgcggcgtgcatgcgcgctccggtcccgctggcgatggcgtacgcccccccggccccatctgcgaccgggggtctacgaacggacttcgtgtggcaggagcgcgcggccgtggttaaccggagtctggttattcacggggtccgagagacggacagcggcctgtataccctgtccgtgggcgacataaaggacccggctcgccaagtggcctcggtggtcctggtggtgcaaccggccccagttccgaccccacccccgaccccagccgattacgacgaggatgacaatgacgagggcgaggacgaaagtctcgccggcactcccgccagcgggaccccccggctcccgcctccccccgcccccccgaggtcttggcccagcgcccccgaagtctcacatgtgcgtggggtgaccgtgcgtatggagactccggaagctatcctgttttcccccggggagacgttcagcacgaacgtctccatccatgccatcgcccacgacgaccagacctactccatggacgtcgtctggttgaggttcgacgtgccgacctcgtgtgccgagatgcgaatatacgaatcgtgtctgtatcacccgcagctcccagaatgtctgtccccggccgacgcgccgtgcgccgcgagtacgtggacgtctcgcctggccgtccgcagctacgcggggtgttccagaacaaaccccccaccgcgctgttcggccgaggctcacatggagcccgtcccggggctggcgtggcaggcggcctccgtcaatctggagttccgggacgcgtccccacaacactccggcctgtatctgtgtgtggtgtacgtcaacgaccatattcacgcctggggccacattaccatcagcaccgcggcgcagtaccggaacgcggtggtggaacagcccctcccacagcgcggcgcggatttggccgagcccacccacccgcacgtcggggcccctccccacgcgcccccaacccacggcgccctgcggttaggggcggtgatgggggccgccctgctgctgtctgcgctggggttgtcggtgtgggcgtgtatgacctgttggcgcaggcgtgcctggcgggcggttaaaagcagggcctcgggtaaggggcccacgtacattcgcgtggccgacagcgagctgtacgcggactggagctcggacagcgagggagaacgcgaccaggtcccgtggctggcccccccggagagacccgactctccctccaccaatggatccggctttgagatcttatcaccaacggctccgtctgtatacccccgtagcgacgggcatcaatctcgccgccagctcacaacctttggatccggaaggcccgatcgccgttactcccaggcctccgattcgtccgtcttctggtaaggcgccccatcccgaggccccacgtcggtcgccgaactgggcgaccgccggcgaggtggacgtcggagacgagctaatcgcgatttccgacgaacgcggacccccccgacatgaccgcccgcccctcgccacgtcgaccgcgccctcgccacacccgcgacccccgggctacacggccgttgtctccccgatggccctccaggctgtcgacgccccctccctgtttgtcgcctggctggccgctcggtggctccggggggcttccggcctgggggccgtcctgtgtgggattgcgtggtatgtgacgtcaattgcccgaggcgcacaaagggccggtggtccgcctagccgcagcaaattaaaaatcgtgagtcacagcgaccgcaacttcccacccggagctttcttccggcctcgatgacgtcccggctctccgatcccaactcctcagcgcgatccgacatgtccgtgccgctttatcccacggcctcgccagtttcggtcgaagcctactactcggaaagcgaagacgaggcggccaacgacttcctcgtacgcatgggccgccaacagtcggtattaaggcgttgacgcagacgcacccgctgcgtcggcatggtgatcgcctgtctcctcgtggccgttctgtcgggcggatttggggcgctcctgatgtggctgctccgctaaaagaccgcatcgacacgcgcgtccttcttgtcgtctctcttcccccccatcaccccgcaatttgcacccagcctttaactacattaaattgggttcgattggcaatgttgtctcccggttgatttttgggtgggtggggagtgggtgggtggggagtgggtgggtggggagtgggtgggtggggagtgggtgggtggggagtgggtgggtggggagtgggtgggtggggagtgggtgggtggggagtgggtgggtggggagtgggtgggtggggagtggcaaggaagaaacaagcccgaccaccagacagaaaatgtaaccatacccaaaccgactctgggggctgtttgtggggtcggaaccataggatgaacaaaccaccccgtacctcccgcacccaagggtgcgggtggctcatcggcatctgtccggtatgggttgttccccacccactcgcgttcggacgtcttagaatcatggcggttttctatgccgacatcggttttctcccccgcaataagacacgatgcgataaaatctgtttgtaaaatttattaagggtacaaattgccctagcacaggggtggggttagggccgggtccccacacccaaacgcaccaaacagatgcaggcagtgggtcgagtacagccccgcgtacgaacacgtcgatgcgtgtgtcagacagcaccagaaagcacaggccatcaacaggtcgtgcatgtgtcggtgggtttggacgcggggggccatggtggtgataaagttaatggccgccgtccgccagggccacaggggcgacgtctcttggttggcccggagccactgggtgtggaccagccgcgcgtggcggcccaacatggcccctgtagccgggggcgggggatcgcgcacgtttgcagcgcacatgcgagacacctcgaccacggttcgaaagaaggcccggtggtccgcgggcaacatcaccaggtgcgcaagcgcccgggcgtccagagggtagagccctgagtcatccgaggttggctcatcgcccgggtcttgccgcaagtgcgtgtgggttgggcttccggtgggcgggacgcgaaccgcggtgtggatcccgacgcgggcccgagcgtatgctccatcttgtggggagaaggggtctgggctcgccaggggggcatacttgcccgggctatacagacccgcgagccgtacgtggttcgcggggggtgcgtggggtccggggctccctgggagaccggggttgtcgtggatccctggggtcacgcggtaccctggggtctctgggagctcgcggtactctgggttccctaggttctcggggtggtcgcggaacccggggctcccggggaacacgcggtgtcctggggattgttggcggtcggacggcttcagatggcttcgagatcgtagtgtccgcaccgactcgtagtagacccgaatctccacattgccccgccgcttgatcattatcaccccgttgcgggggtccggagatcatgcgcgggtgtcctcgaggtgcgtgaacacctctggggtgcatgccggcggacggcacgccttttaagtaaacatctgggtcgcccggcccaactggggccgggggttgggtctggctcatctcgagagacacgggggggaaccaccctccgcccagagactcgggtgatggtcgtacccgggacctacttgtcgtcatcgtctttgtagtcgaccgagttcgccgggccggctccgcgggccagggcccgggcacgggcctcgggccccaggcacggcccgatgaccgcctcggcctccgccacccggcgccggaaccgagcccggtcggcccgctcgcgggcccacgagccgcggcgcgccaggcgggcggccgaggcccagaccaccaggtggcgcacccggacgtggggcgagaagcgcacccgcgtgggggtcgcgggggtcgcgggggtcgcggggggcttcggcgccccctccccgcccgcgcgtcgcaggcgcaggcgcgccaggtgctctgcggtgacgcgcaggcggagggcgaggcgcggcggaaggcggaaggggcgtgagggggggtgggaggggttagccccgccccccgggcccgcgccgggcggtggggaccgggggcggggggcggcggcggtgggccgggcctctggcgccggctcgggcggggggctgtccggccagtcgtcgtcgtcgtcgtcggacgcggactcgggaacgtggagccactggcgcagcagcagcgaacaagaaggcgggggcccactggcggggggcggcggcggggcggccgcgggcgcgctcctgaccacgggttccgagttgggcgtggaggttacctgggactgtgcggttgggaccgcgcccgtgggcccgggcggccgggggcggcgggggccgcgatggcggcggcgggccatgtttaaacagctctgcttatatagacctcccaccgtacacgcctaccgcccatttgcgtcaatggggcggagttgttacgacattttggaaagtcccgttgattttggtgccaaaacaaactcccattgacgtcaatggggtggagacttggaaatccccgtgagtcaaaccgctatccacgcccattgatgtactgccaaaaccgcatcaccatggtaatagcgatgactaatacgtagatgtactgccaagtaggaaagtcccataaggtcatgtactgggcataatgccaggcgggccatttaccgtcattgacgtcaatagggggcgtacttggcatatgatacacttgatgtactgccaagtgggcagtttaccgtaaatactccacccattgacgtcaatggaaagtccctattggcgttactatgggaacatacgtcattattgacgtcaatgggcgggggtcgttgggcggtcagccaggcgggccatttaccgtaagttatgtaacgacaacttcgtatagaaaggtatatacgaagttgtcaattctcatgtttgacagcttatcatcgaatttctgccattcatccgcttattatcacttattcaggcgtagcaaccaggcgtttaagggcaccaataactgccttaaaaaaattagaaaaactcatcgagcatcaaatgaaactgcaatttattcatatcaggattatcaataccatatttttgaaaaagccgtttctgcggcgcgcaattccacttgcaattacataaaaaattccggcggtttttcgcgtgtgactcaatgtcgaaatacctgcctaatgaacatgaacatcgcccaaatgtatttgaagacccgctgggagaagttcaagatatataagtaacaagcagccaatagtataaaaaaaaatctgagtttattacctttcctggaatttcagtgaaaaactgctaattatagagagatatcacagagttactcactaatgactaacgaaaaggtctggatagagaagttggataatccaactctttcagtgttaccacatgactttttacgcccacaacaagaaccttatacgaaacaagctacatattcgttacagctacctcagctcgatgtgcctcatgatagtttttctaacaaatacgctgtcgctttgagtgtatgggctgcattgatatatagagtaaccggtgacgatgatattgttctttatattgcgaataacaaaatcttaagattcaatattcaaccaacgtggtcatttaatgagctgtattctacaattaacaatgagttgaacaagctcaattctattgaggccaatttttcctttgacgagctagctgaaaaaattcaaagttgccaagatctggaaaggacccctcagttgttccgtttggcctttttggaaaaccaagatttcaaattagacgagttcaagcatcatttagtggactttgctttgaatttggataccagtaataatgcgcatgttttgaacttaatttataacagcttactgtattcgaatgaaagagtaaccattgttgcggaccaatttactcaatatttgactgctgcgctaagcgatccatccaattgcataactaaaatctctctgatcaccgcatcatccaaggatagtttacctgatccaactaagaacttgggctggtgcgatttcgtggggtgtattcacgacattttccaggacaatgctgaagccttcccagagagaacctgtgttgtggagactccaacactaaattccgacaagtcccgttctttcacttatcgcgacatcaaccgcacttctaacatagttgcccattatttgattaaaacaggtatcaaaagaggtgatgtagtgatgatctattcttctaggggtgtggatttgatggtatgtgtgatgggtgtcttgaaagccggcgcaaccttttcagttatcgaccctgcatatcccccagccagacaaaccatttacttaggtgttgctaaaccacgtgggttgattgttattagagctgctggacaattggatcaactagtagaagattacatcaatgatgaattggagattgtttcaagaatcaattccatcgctattcaagaaaatggtaccattgaaggtggcaaattggacaatggcgaggatgttttggctccatatgatcactacaaagacaccagaacaggtgttgtagttggaccagattccaacccaaccctatctttcacatctggttccgaaggtattcctaagggtgttcttggtagacatttttccttggcttattatttcaattggatgtccaaaaggttcaacttaacagaaaatgataaattcacaatgctgagcggtattgcacatgatccaattcaaagagatatgtttacaccattatttttaggtgcccaattgtatgtccctactcaagatgatattggtacaccgggccgtttagcggaatggatgagtaagtatggttgcacagttacccatttaacacctgccatgggtcaattacttactgcccaagctactacaccattccctaagttacatcatgcgttctttgtgggtgacattttaacaaaacgtgattgtctgaggttacaaaccttggcagaaaattgccgtattgttaatatgtacggtaccactgaaacacagcgtgcagtttcttatttcgaagttaaatcaaaaaatgacgatccaaactttttgaaaaaattgaaagatgtcatgcctgctggtaaaggtatgttgaacgttcagctactagttgttaacaggaacgatcgtactcaaatatgtggtattggcgaaataggtgagatttatgttcgtgcaggtggtttggccgaaggttatagaggattaccagaattgaataaagaaaaatttgtgaacaactggtttgttgaaaaagatcactggaattatttggataaggataatggtgaaccttggagacaattctggttaggtccaagagatagattgtacagaacgggtgatttaggtcgttatctaccaaacggtgactgtgaatgttgcggtagggctgatgatcaagttaaaattcgtgggttcagaatcgaattaggagaaatagatacgcacatttcccaacatccattggtaagagaaaacattactttagttcgcaaaaatgccgacaatgagccaacattgatcacatttatggtcccaagatttgacaagccagatgacttgtctaagttccaaagtgatgttccaaaggaggttgaaactgaccctatagttaagggcttaatcggttaccatcttttatccaaggacatcaggactttcttaaagaaaagattggctagctatgctatgccttccttgattgtggttatggataaactaccattgaatccaaatggtaaagttgataagcctaaacttcaattcccaactcccaagcaattaaatttggtagctgaaaatacagtttctgaaactgacgactctcagtttaccaatgttgagcgcgaggttagagacttatggttaagtatattacctaccaagccagcatctgtatcaccagatgattcgtttttcgatttaggtggtcattctatcttggctaccaaaatgatttttaccttaaagaaaaagctgcaagttgatttaccattgggcacaattttcaagtatccaacgataaaggcctttgccgcggaaattgacagaattaaatcatcgggtggatcatctcaaggtgaggtcgtcgaaaatgtcactgcaaattatgcggaagacgccaagaaattggttgagacgctaccaagttcgtacccctctcgagaatattttgttgaacctaatagtgccgaaggaaaaacaacaattaatgtgtttgttaccggtgtcacaggatttctgggctcctacatccttgcagatttgttaggacgttctccaaagaactacagtttcaaagtgtttgcccacgtcagggccaaggatgaagaagctgcatttgcaagattacaaaaggcaggtatcacctatggtacttggaacgaaaaatttgcctcaaatattaaagttgtattaggcgatttatctaaaagccaatttggtctttcagatgagaagtggatggatttggcaaacacagttgatataattatccataatggtgcgttagttcactgggtttatccatatgccaaattgagggatccaaatgttatttcaactatcaatgttatgagcttagccgccgtcggcaagccaaagttctttgactttgtttcctccacttctactcttgacactgaatactactttaatttgtcagataaacttgttagcgaagggaagccaggcattttagaatcagacgatttaatgaactctgcaagcgggctcactggtggatatggtcagtccaaatgggctgctgagtacatcattagacgtgcaggtgaaaggggcctacgtgggtgtattgtcagaccaggttacgtaacaggtgcctctgccaatggttcttcaaacacagatgatttcttattgagatttttgaaaggttcagtccaattaggtaagattccagatatcgaaaattccgtgaatatggttccagtagatcatgttgctcgtgttgttgttgctacgtctttgaatcctcccaaagaaaatgaattggccgttgctcaagtaacgggtcacccaagaatattattcaaagactacttgtatactttacacgattatggttacgatgtcgaaatcgaaagctattctaaatggaagaaatcattggaggcgtctgttattgacaggaatgaagaaaatgcgttgtatcctttgctacacatggtcttagacaacttacctgaaagtaccaaagctccggaactagacgataggaacgccgtggcatctttaaagaaagacaccgcatggacaggtgttgattggtctaatggaataggtgttactccagaagaggttggtatatatattgcatttttaaacaaggttggatttttacctccaccaactcataatgacaaacttccactgccaagtatagaactaactcaagcgcaaataagtctagttgcttcaggtgctggtgctcgtggaagctccgcagcagcttaaggttgagcattacgtatgatatgtccatgtacaataattaaatatgaattaggagaaagacttagcttcttttcgggtgatgtcacttaaaaactccgagaataatatataataagagaataaaatattagttattgaataagaactgtaaatcagctggcgttagtctgctaatggcagcttcatcttggtttattgtagcatgaatcatatttgcctttttttcctgtaattcaatgattcttgcttctatactatcctcaatgcaaaaccttgtgatcttcacaggtcgatactgaccaattctatgaactctatcaccactttgccattcaacactagggttccaccatgggtctaaaatgaatacttgcgaagctgcccgggcggccgcccaactacgcagccgatcaacaacagaaacgcgacggtcgagatgaggaacgcacactggagcctttatcagatggtgttgatttcaattactccggagcgtgatgcggatcaaagtaaccgcgatggaaggtgggggactcgaaatagatccgttcttagccctgcgaaacatctactgtacaccacatgcaacagccacaattctcatgtttgacagcttatcatcgaatttctgccattcatccgcttattatcacttattcaggcgtagcaaccaggcgtttaagggcaccaataactgccttaaaaaaattagaaaaactcatcgagcatcaaatgaaactgcaatttattcatatcaggattatcaataccatatttttgaaaaagccgtttctgtaatgaaggagaaaactcaccgaggcagttccataggatggcaagatcctggtatcggtctgcgattccgactcgtccaacatcaatacaacctattaatttcccctcgtcaaaaataaggttatcaagtgagaaatcaccatgagtgacgactgaatccggtgagaatggcaaaagtttatgcatttctttccagacttgttcaacaggccagccattacgctcgtcatcaaaatcactcgcatcaaccaaaccgttattcattcgtgattgcgcctgagccagacgaaatacgcgatcgctgttaaaaggacaattacaaacaggaatcgaatgcaaccggcgcaggaacactgccagcgcatcaacaatattttcacctgaatcaggatattcttctaatacctggaatgctgtttttccggggatcgcagtggtgagtaaccatgcatcatcaggagtacggataaaatgcttgatggtcggaagaggcataaattccgtcagccagtttagtctgaccatctcatctgtaacatcattggcaacgctacctttgccatgtttcagaaacaactctggcgcatcgggcttcccatacaatcgatagattgtcgcacctgattgcccgacattatcgcgagcccatttatacccatataaatcagcatccatgttggaatttaatcgcggcctcgagcaagacgtttcccgttgaatatggctcattttagcttccttagctcctgaaaatctcgataactcaaaaaatacgtccggtagtgatcttatttcattatggtgaaagttggaacctcttacgtgccgatcaacgtccctgggtccttttcatcacgtgggtgatgctgccaacttactgatttagtgtatgatggtgtttttgaggtgctccagtggcttctgtttctatcagctgtccctcctgttcagctactgacggggtggtgcgtaacggcaaaagcaccgccggacatcagcgctatctctgctctcactgccgtaaaacatggcaactgcagttcacttacaccgcttctcaacccggtacgcaccagaaaatcattgatatggccatgaatggcgttggatgccgggcaacagcccgcattatgggcgttggcctcaacacgattttacgtcacttaaaaaactcaggccgcagtcggtaacctcgcgcatacagccgggcagtgacgtcatcgtctgcgcggaaatggacgaacagtggggctatgtcggggctaaatcgcgccagcgctggctgttttacgcgtatgacagtctccggaagacggttgttgcgcacgtattcggtgaacgcactatggcgacgctggggcgtcttatgagcctgctgtcaccctttgacgtggtgatatggatgacggatggctggccgctgtatgaatcccgcctgaagggaaagctgcacgtaatcagcaagcgatatacgcagcgaattgagcggcataacctgaatctgaggcagcacctggcacggctgggacggaagtcgctgtcgttctcaaaatcggtggagctgcatgacaaagtcatcgggcattatctgaacataaaacactatcaataagttggagtcattacccatcacgtgctataaaaataattataatttaaattttttaatataaatatataaattaaaaatagaaagtaaaaaaagaaattaaagaaaaaatagtttttgttttccgaagatgtaaaagactctagggggatcgccaacaaatactaccttttatcttgctcttcctgctctcaggtattaatgccgaattgtttcatcttgtctgtgtagaagaccacacacgaaaatcctgtgattttacattttacttatcgttaatcgaatgtatatctatttaatctgcttttcttgtctaataaatatatatgtaaagtacgctttttgttgaaattttttaaacctttgtttatttttttttcttcattccgtaactcttctaccttctttatttactttctaaaatccaaatacaaaacataaaaataaataaacacagagtaaattcccaaattattccatcattaaaagatacgaggcgcgtgtaagttacaggcaagcgatcttttcgccaaaagttggcccagggcttcccggtatcaacagggacaccaggatttatttattctgcgaagtgatcttccgtcacaggtatttattcgcgataagctcatggagcggcgtaaccgtcgcacaggaaggacagagaaagcgcggatctgggaagtgacggacagaacggtcaggacctggattggggaggcggttgccgccgctgctgctgacggtgtgacgttctctgttccggtcacaccacatacgttccgccattcctatgcgatgcacatgctgtatgccggtataccgctgaaagttctgcaaagcctgatgggacataagtccatcagttcaacggaagtctacacgaaggtttttgcgctggatgtggctgcccggcaccgggtgcagtttgcgatgccggagtctgatgcggttgcgatgctgaaacaattatcctgagaataaatgccttggcctttatatggaaatgtggaactgagtggatatgctgtttttgtctgttaaacagagaagctggctgttatccactgagaagcgagcgaaacagtcgggaaaatctcccattatcgtagagatccgcattattaatctcaggagcctgtgtagcgtttataggaagtagtgttctgtcatgatgcctgcaagcggtaacgaaaacgatttgaatatgccttcaggaacaatagaaatcttcgtgcggtgttacgttgaagtggagcggattatgtcagcaatggacagaacaacctaatgaacacagaaccatgatgtggtctgtccttttacagccagtagtgctcgccgcagtcgagcgacagggcgaagccctcgagctggttgccctcgccgctgggctggcggctgtctatggccctgcaaacgcgccagaaacgccgtcgaagccgtgtgcgagacaccgcggccggccgccggcgttgtggatacctcgcggaaaacttggccctcactgacagatgaggggcggacgttgacacttgaggggccgactcacccggcgcggcgttgacagatgaggggcaggctcgatttcggccggcgacgtggagctggacagcctcgcaaatcggcgaaaacgcctgattttacgcgagtttcccacagatgatgtggacaagcctggggataagtgccctgcggtattgacacttgaggggcgcgactactgacagatgaggggcgcgatccttgacacttgaggggcagagtgctgacagatgaggggcgcacctattgacatttgaggggctgtccacaggcagaaaatccagcatttgcaagggtttccgcccgtttttcggccaccgctaacctgtcttttaacctgcttttaaaccaatatttataaaccttgtttttaaccagggctgcgccctgtgcgcgtgaccgcgcacgccgaaggggggtgcccccccttctcgaaccctcccggtcgagtgagcgaggaagcaccagggaacagcacttatatattctgcttacacacgatgcctgaaaaaacttcccttggggttatccacttatccacggggatatttttataattattttttttatagtttttagatcttcttttttagagcgccttgtaggcctttatccatgctggttctagagaaggtgttgtgacaaattgccctttcagtgtgacaaatcaccctcaaatgacagtcctgtctgtgacaaattgcccttaaccctgtgacaaattgccctcagaagaagctgttttttcacaaagttatccctgcttattgactcttttttatttagtgtgacaatctaaaaacttgtcacacttcacatggatctgtcatggcggaaacagcggttatcaatcacaagaaacgtaaaaatagcccgcgaatcgtccagtcaaacgacctcactgaggcggcatatagtctctcccgggatcaaaaacgtatgctgtatctgttcgttgaccagatcagaaaatctgatggcaccctacaggaacatgacggtatctgcgagatccatgttgctaaatatgctgaaatattcggattgacctctgcggaagccagtaaggatatacggcaggcattgaagagtttcgcggggaaggaagtggttttttatcgccctgaagaggatgccggcgatgaaaaaggctatgaatcttttccttggtttatcaaacgtgcgcacagtccatccagagggctttacagtgtacatatcaacccatatctcattcccttctttatcgggttacagaaccggtttacgcagtttcggcttagtgaaacaaaagaaatcaccaatccgtatgccatgcgtttatacgaatccctgtgtcagtatcgtaagccggatggctcaggcattgtctctctgaaaatcgactggatcatagagcgttaccagctgcctcaaagttaccagcgtatgcctgacttccgccgccgcttcctgcaggtctgtgttaatgagatcaacagcagaactccaatgcgcctctcatacattgagaaaaagaaaggccgccagacgactcatatcgtattttccttccgcgatatcacttccatgacgacaggatagtctgagggttatctgtcacagatttgagggtggttcgtcacatttgttctgacctactgagggtaatttgtcacagttttgctgtttccttcagcctgcatggattttctcatactttttgaactgtaatttttaaggaagccaaatttgagggcagtttgtcacagttgatttccttctctttcccttcgtcatgtgacctgatatcgggggttagttcgtcatcattgatgagggttgattatcacagtttattactctgaattggctatccgcgtgtgtacctctacctggagtttttcccacggtggatatttcttcttgcgctgagcgtaagagctatctgacagaacagttcttctttgcttcctcgccagttcgctcgctatgctcggttacacggctgcggcgagcgctagtgataataagtgactgaggtatgtgctcttcttatctccttttgtagtgttgctcttattttaaacaactttgcggttttttgatgactttgcgattttgttgttgctttgcagtaaattgcaagatttaataaaaaaacgcaaagcaatgattaaaggatgttcagaatgaaactcatggaaacacttaaccagtgcataaacgctggtcatgaaatgacgaaggctatcgccattgcacagtttaatgatgacagcccggaagcgaggaaaataacccggcgctggagaataggtgaagcagcggatttagttggggtttcttctcaggctatcagagatgccgagaaagcagggcgactaccgcacccggatatggaaattcgaggacgggttgagcaacgtgttggttatacaattgaacaaattaatcatatgcgtgatgtgtttggtacgcgattgcgacgtgctgaagacgtatttccaccggtgatcggggttgctgcccataaaggtggcgtttacaaaacctcagtttctgttcatcttgctcaggatctggctctgaaggggctacgtgttttgctcgtggaaggtaacgacccccagggaacagcctcaatgtatcacggatgggtaccagatcttcatattcatgcagaagacactctcctgcctttctatcttggggaaaaggacgatgtcacttatgcaataaagcccacttgctggccggggcttgacattattccttcctgtctggctctgcaccgtattgaaactgagttaatgggcaaatttgatgaaggtaaactgcccaccgatccacacctgatgctccgactggccattgaaactgttgctcatgactatgatgtcatagttattgacagcgcgcctaacctgggtatcggcacgattaatgtcgtatgtgctgctgatgtgctgattgttcccacgcctgctgagttgtttgactacacctccgcactgcagtttttcgatatgcttcgtgatctgctcaagaacgttgatcttaaagggttcgagcctgatgtacgtattttgcttaccaaatacagcaatagcaatggctctcagtccccgtggatggaggagcaaattcgggatgcctggggaagcatggttctaaaaaatgttgtacgtgaaacggatgaagttggtaaaggtcagatccggatgagaactgtttttgaacaggccattgatcaacgctcttcaactggtgcctggagaaatgctctttctatttgggaacctgtctgcaatgaaattttcgatcgtctgattaaaccacgctgggagattagataatgaagcgtgcgcctgttattccaaaacatacgctcaatactcaaccggttgaagatacttcgttatcgacaccagctgccccgatggtggattcgttaattgcgcgcgtaggagtaatggctcgcggtaatgccattactttgcctgtatgtggtcgggatgtgaagtttactcttgaagtgctccggggtgatagtgttgagaagacctctcgggtatggtcaggtaatgaacgtgaccaggagctgcttactgaggacgcactggatgatctcatcccttcttttctactgactggtcaacagacaccggcgttcggtcgaagagtatctggtgtcatagaaattgccgatgggagtcgccgtcgtaaagctgctgcacttaccgaaagtgattatcgtgttctggttggcgagctggatgatgagcagatggctgcattatccagattgggtaacgattatcgcccaacaagtgcttatgaacgtggtcagcgttatgcaagccgattgcagaatgaatttgctggaaatatttctgcgctggctgatgcggaaaatatttcacgtaagattattacccgctgtatcaacaccgccaaattgcctaaatcagttgttgctcttttttctcaccccggtgaactatctgcccggtcaggtgatgcacttcaaaaagcctttacagataaagaggaattacttaagcagcaggcatctaaccttcatgagcagaaaaaagctggggtgatatttgaagctgaagaagttatcactcttttaacttctgtgcttaaaacgtcatctgcatcaagaactagtttaagctcacgacatcagtttgctcctggagcgacagtattgtataagggcgataaaatggtgcttaacctggacaggtcccgtgttccaactgagtgtatagagaaaattgaggc

SEQ ID NO: 10 - DNA, 138997 bp, synthetic construct
  source 1..138997: mol_type = other DNA
ttatagggtgctaaagttcaccgccccctgcatcatgggccaggcctcggtggggagctccgacagcgccgcctccaggatgatgtcagcgttggggttggcgctggatgagtgcgtgcgcaaacagcgcccccacgcaggcacgcgtagcttgaagcgcgcgcccgcaaactcccgcttgtgggccataagcagggcgtacagctgcctgtgggtccggcaggcgctgtggtcgatgtggtgggcgtccaacaaccccacgattgtctgtttggtgaggtttttaacgcgccccgccccgggaaacgtctgcgtgcttttggccatctgcacgccaaacagttcgccccagattatcttgaacagcgccaccgcgtggtccgtctcgctaacggacccgcgcgggggacagccgcttagggcgtcggcgacgcgcttgacggcttcctccgagagcagaagtccgtcggttacgttacagtggcccagttcgaacaccagctgcatgtagcggtcgtagtggggggtcagtaggtccagcacgtcatcggggccgaaggtcctcccagatcccccggccgccgagtcccaatgcaggcgcgcggccatggtgctgcacaggcacaacagctcccagacgggggttacgttcagggtggggggcagggccacgagctccagctctccggtgacgttgatcgtggggatgacgcccgtggcgtagtggtcatagatccgccgaaatatggcgctgctgcgggtggccatgggaacgcggagacaggcctccagcaacgccaggtaaataaaccgcgtgcgtcccatcaggctgttgaggttgcgcatgagcgcgacaatttccgccggcgcgacatcggaccggaggtatttttcgacgaaaagacccacctcctccgtctcggcggcctgggccggcagcgacgcctcgggatcccggcaccgcagctcccgtagatcgcgctgggccctgagggcgtcgaaatgtacgccccgcaaaaacagacagaagtcctttggggtcagggtatcgtcgtgtccccagaagcgcacgcgtatgcagtttagggtcagcagcatgtgaaggatgttaaggctgtccgagagacacgccagcgtgcatctctcaaagtagtgtttgtaacggaatttgttgtagatgcgcgacccccgccccagcgacgtgtcgcatgccgacgcgtcacagcgccccttgaaccggcgacacagcaggtttgtgacctgggagaactgcgcgggccactggccgcaggaactgaccacgtgattaaggagcatgggcgtaaagacgggctccgagcgcgccccggagccgtccatgtaaatcagtagctcccccttgcggagggtgcgcacccgtcccagggactggtacacggacaccatgtccggtccgtagttcatgggttttacgtaggcgaacatgccatcaaagtgcaggggatcgaagctgaggcccacggttacgaccgtcgtgtatataaccacgcggtattggccccacgtggtcacgtccccgaggggggtgagcgagtgaagcaacagcacgcggtccgtaaactgacggcagaaccgggccacgatctccgcgaaggagaccgtcgacgaaaaaatgcagatgttatcgcccccgccaaggcgcgcttccagctccccaaagaacgtggccccccgggcgtccggagaggcgtccggagacgggccgctcggcggcccgggcgggcgcagggcagcctgcaggagctcggtccccagacgcgggagaaacaggcaccggcgcgccgaaaacccgggcatggcgtactcgccgaccaccacatgcacgtttttttcgccccggagaccgcacaggaagtccaccaactgcgcgttggcggttgcgtccatggcgatgatccgaggacaggtgcgcagcaggcgtagcattaacgcatccacgcggcccagttgctgcatcgttggcgaatagagctggcccagcgtcgacataacctcgtccagaacgaggacgtcgtagttgttcagaaggttggggcccacgcgatgaaggctttccacctggacgataagtcggtggaaggggcggtcgttcataatgtaattggtggatgagaagtaggtgacaaagtcgaccaggcctgactcagcgaaccgcgtcgccagggtctgggtaaaactccgacgacaggagacgacgagcacactcgtgtccggagagtggatcgcttcccgcagccagcggatcagcgcggtagtttttcccgaccccattggcgcgcggaccacagtcacgcacctggccgtcggggcgctcgcgttggggaaggtgacgggtccgtgctgctgccgctcgatcgttgttttcgggtgaacccggggcacccattcggccaaatcccccccgtacaacatccgcgctagcgatacgctcgacgtgtactgttcgcactcgtcgtccccaatgggacgcccggcccccagaggatctcccgactccgcgccccccacgaaaggcatgaccggggcgcggacggcgtggtgggtctggtgtgtgcaggtggcgacgtttgtggtctctgcggtctgcgtcacggggctcctcgtcctggcctctgtgttccgggcacggtttccctgcttttacgccacggcgagctcttatgccggggtgaactccacggccgaggtgcgcgggggtgtagccgtgcccctcaggttggacacgcagagccttgtgggcacttatgtaatcacggccgtgttgttgttggccgcggccgtgtatgccgtggtcggcgccgtgacctcccgctacgaccgcgccctggacgcgggccgccgtctggctgcggcccgcatggccatgccgcacgccacgctgatcgccggaaacgtctgctcttggttgctgcagatcaccgtcctgttgctggcccatcgcaccagccagctggcccacctggtttacgtcctgcactttgcgtgtctggtgtattttgcggcccatttttgcaccaggggggtcctgagcgggacgtatctgcgtcaggtgcacggcctgatggagccggccccgactcatcatcgcgtcgttggcccggctcgagccgtgctgacaaacgccttgctgttgggcgtcttcctgtgcacggccgacgccgcggtatccctgaataccatcgccgcgttcaactttaatttttcggccccgggcatgctcatatgcctgaccgtgctgttcgcccttctcgtcgtatcgctgttgttggtggtcgagggggtgttgtgtcactacgtgcgcgtgttggtgggcccccacctgggggccgtggccgccacgggcatcgtcggcctggcatgcgagcactattacaccaacggctactacgttgtggagacgcagtggccgggggcccagacgggagtccgcgtcgccctcgccctggtcgccgcctttgccctcggcatggccgtgctccgctgcacccgcgcctatctgtatcacaggcggcaccacaccaaattttttatgcgcatgcgcgacacgcgacaccgcgcacattccgccctcaagcgcgtacgcagttccatgcgcggatcgcgagacggccgccacaggcccgcacccggcagcccgcccgggattcccgaatatgcggaagacccctacgcgatctcatacggcggccagctcgaccggtacggagattccgacggggagccgatttacgacgaggtggcggacgaccaaaccgacgtattgtacgccaagatacaacacccgcggcacctgcccgacgacgagcccatctatgacaccgttggggggtacgaccccgagcccgccgaggaccccgtgtacagcaccgtccgccgttggtagctgtttggttccgttttaataaaccgtttgtgtttaacccgaccgtggtgtatgtctggtgtgtggcgtccgatcccgttactatcaccgttccccccaaaccccggcgattgtgggtttttttaaaaacgacacgcgtgcgaccgtatacagaacattgttgttttttattcgctatcggacatggggggtggaaactgggtggcggggcaggcgcctccgggggttcgccggtgagtgtggcgcgaggggggatccgacgaacgcaggcgctgtctccccggggcccgcgtaaccccgcgcatatccgggggcacgtagaaattaccttcctcttcggactcgatatccacgacgtcaaagtcgtgggcggtcagcgagacgacctccccgtcgtcggtgatgaggacgttgtttcggcagcagcagggccgggtcccggagaacgagaggcccatagctcggcgagcgtgtcgtcgaacgccaggcggctgcttcgctgtatggccttatagatctccggatcgatgcggacgggggtaatgatcagggcgatcggaacggcctggttcgggagaatggacgccttgctgggtcctgcggccccgagagccccggcgccgtcctccaggcggaacgttacgccctcctccgcgctagtgcggtgcctgccgataaacgtcaccagatgcgggtggggggggcagtcggggaagtggctgtcgagcacgtagccctgcaccaagatctgcttaaagttcgggtgacgggggttcgcgaagacgggctcgcggcgtaccagatccccggagctccaggacacgggggagatggtgtggcgtccgaggtcgggggcgccaaacagaagcacctccgagacaacgccgctatttaactccaccaaggcccgatccgcggcggagcaccgccttttttcgcccgaggcgtgggcctctgaccaggcctggtcttgcgtgacgagagcctcctccgggccggggacgcgcccgggcgcgaagtatcgcacgctgggcttcgggatcgaccggataaatgcccggaacgcctccggggaccggtgtgccatcaagtcctcgtacgcggaggccgtggggtcgctggggtccatggggtcgaaagcgtacttggcccggcatttgacctcgtaaaaggccaggggggtcttggggactggggccaagtagccgtgaatgtcccgaggacagacgagaatatccagggacgccccgaccatccccgtgtgaccgtccatgaggaccccacacgtatgcacgttctcttcggcgaggtcgccgggttcgtggaagataaagcgccgcgtgtcggcgccggcctcgccgccgtcgtccgcgcggcccacgcagtagcgaaacagcaggcttcgggccgtcggctcgttcacccgcccgaacatcaccgccgaagactgtacatccggccgcaggctggcgttgtgcttcagccactggggcgagaaacacggaccctgggggccccagcggagggtggatgcggtcgtgaggccccgccggagcagggcccatagctggcagtcggcctggttttgcgtggccgcctcgtaaaaccccatgaggggccggggcgccacggcgtccgcggcggccgggggcccgcggcgcgtcaggcgccataggtgccggccgagtccgcggtccaccatacccgcctcctcgaggaccacggccagggaacacagataatccaggcgggcccagaggggaccgatggccagaggggcgcggacgccgcgcagcaacccgcgcaggtggcgctcgaacgtctcggctagtatatgggagggcagcgcgttggggatcaccgacgccgaccacatagagtcaaggtccggggagtcgggatcggcgtccgggtcgcgggcgtgggtgcccccaggagatagcggaatgtctggggtcggaggccctgaggcgtcagaaagtgccggcgacgcggcccggggcttttcgtctgcggtgtcggtggcgtgctgatcacgtggggggttaacgggcgaatgggagctcgggtccacagctgacgtcgtctggggtggggggggcaggggacggaaggtggttgttagcggaagactgttagggcgggggcgcttgggggggctgtcggggccacgaggggtgtcctcggccagggcccaggaacgcttagtcacggtgcgtcccggcggacatgctgggcctcccgtggactccatttccgagacgacgtggggggagcggtggttgagcgcgccgccgggtgaacgctgattctcacgacagcgcgtgccgcgcgcacgggttggtgtgacacaggcgggacaccagcaccaggagaggcttaagctcgggaggcagcgccaccgacgacagtatcgccttgtgtgtgtgctggtaatttatacaccgatccgtaaacgcgcgccgaatcttgggattgcggaggtggcgccggatgccctctgggacgtcatacgccaggccgtgggtgttggtctcggccgagttgacaaacagggctgggtgcagcacgcggcgataggcgagcagggccagggcgaagtccagcgacagctggttgttgaaatactggtaaccgggaaaccgggtcacgggtacgcccaggctcggggcgacgtacacgctaaccaccaactccagcagcgtctggccaagggcgtacaggtcaaccgctaacccgacgtcgtgcttcaggcggtggttggtaaattcggcccgttcgttgttaaggtatttcaccaacagctccgggggctggttatacccgtgacccaccagggtgtgaaagttggctgtggttagggcggtgggcatgccaaacatccggggggacttgaggtccggctcctggaggcaaaactgcccccgggcgatcgtggagttggagttgagggtgacgaggctaaagtcggcgaggacggcccgccggagcgagacggcgtccgaccgcagcatgacgaggatgttggcgcacttgatatccaggtggctgatcccgcaggtggtgtttaaaaacacaacggcgcgggccagctccgtgaagcactggtggagggccgtcgagaccgaggggtttgttgtgcgcagggacgccagttggccgatatacttaccgaggtccatgtcgtacgcggggaacactatctgtcgttgttgcagcgagaacccgaggggcgcgatgaagccgcggatgttgtgggtgcggccggcgcgtagagcgcactccccgaccaacagggtcgcgatgagctcaacggcaaaccactccttttcctttatggtcttaacggcaagcttatgttcgcgaatcagttggacgtcgccgtatcccccagaccccccgaagcttcgggccccggggatctcgagggtcgtgtagtgtagggcggggttgatggcgaacacggggctgcatagcttgcggatgcgcgtgagggtaaggatgtgcgagggggacgaggggggtgcggttaacgccgcctgggatctgcgcaggggcgggcggttcagtttggccgccgtaccgggcgtctcgggggacgcgcggcgatgagacgagcggctcattcgccatcgggatagtcccgcgcgaagccgctcgcggaggccggatcggtggcgggacccgtgggaggagcgggagccggcggcgtcctggagagaggggccgctggggcgcccggaggccccgtgtgggttggagtgtatgtaggatgcgagccaatccttgaaggactgttggcgtgcaccttgggggctgaggttagctgccacatgaccagcaggtcgctgtctgcgggactcatccatccttcggccaggtcgccgtcttcccacagagaagcgttggtcgctgcttcctcgagttgctcctcctggtccgcaagacgatcgtccacggcgtccaggcgctcaccaagcgccggatcgaggtaccgtcggtgtgcggttagaaagtcacgacgcgccgcttgctcctccacgcgaattttaacacaggtcgcgcgctgtcgcatcatctctaagcgcgcgcgggactttagccgcgcctccaattccaagtgggccgcctttgcagccataaaggcgccaacaaaccgaggatcttgggtgctgacgccctcccggtgcagctgcagggtctggtccttgtaaatctcggctcggaggtgcgtctcggccaggcgtcggcgcagggccgcgtgggcggcatctcggtccattccgccaccctgcgggcgacccggggggtgctctgatagtctcgcgtgcccaaggcccgtgatcggggtacttcgccgccgcgacccgccacccggtgtgcgcgatgtttggtcagcagctggcgtccgacgtccagcagtacctggagcgcctcgagaaacagaggcaacttaaggtgggcgcggacgaggcgtcggcgggcctcacaatgggcggcgatgccctacgagtgccctttttagatttcgcgaccgcgacccccaagcgccaccagaccgtggtcccgggcgtcgggacgctccacgactgctgcgagcactcgccgctcttctcggccgtggcgcggcggctgctgtttaatagcctggtgccggcgcaactaaaggggcgtgatttcgggggcgaccacacggccaagctggaattcctggcccccgagttggtacgggcggtggcgcgactgcggtttaaggagtgcgcgccggcggacgtggtgcctcagcgtaacgcctactatagcgttctgaacacgtttcaggccctccaccgctccgaagcctttcgccagctggtgcactttgtgcgggactttgcccagctgcttaaaacctccttccgggcctccagcctcacggagaccacgggccccccaaaaaaacgggccaaggtggacgtggccacccacggccggacgtacggcacgctggagctgttccaaaaaatgatccttatgcacgccacctactttctggccgccgtgctcctcggggaccacgcggagcaggtcaacacgttcctgcgtctcgtgtttgagatccccctgtttagcgacgcggccgtgcgccacttccgccagcgcgccaccgtgtttctcgtcccccggcgccacggcaagacctggtttctagtgcccctcatcgcgctgtcgctggcctcctttcgggggatcaagatcggctacacggcgcacatccgcaaggcgaccgagccggtgtttgaggagatcgacgcctgcctgcggggctggttcggttcggcccgagtggaccacgttaaaggggaaaccatctccttctcgtttccggacgggtcgcgcagtaccatcgtgtttgcctccagccacaacacaaacgtaagtcctcttttctttcgcatggctctcccaaggggccccgggtcgacccgacccacacccacccacccacccacatacacacacaaccagacgcgggaggaaagtctgccccgtgggcactgatttttattcgggatcgcttgaggaggcccgggcaacggcccgggcaacggtggggcaactcgtagcaaataggcgactgatgtacgaagagaagacacacaggcgccacccggcgctggtcggggggatgttgtccgcgccgcaccgtcccccgacgacctcttgcagacggtccgtgatgcaaggacggcggggggcctgcagcagggtgaccgtatccacgggatggccaaagagaagcggacacaggctagcatccccctggaccgccagggtacactgggccatcttggcccacagacacggggcgacgcagggacaggactccgttacgacggaggagagccacagtgcgttggcggaatcgatgtggggcggcggggcgcaggactcgcagccccccgggtggttggtgatcctggccaggagccatcccagatggcgggccctgcttcccggtggacagagcgaccccaggtcgctgtccatggcccagcagtagatctggccgctggggaggtgccaccaggcccccgggcccaaggcgcaacacgcgcccggctccgggggggtcttcgcggggaccagatacgcgccatccagctcgccgaccactggctcctccgcgagctgttcggtggttgggtcgggggtttcctccgggggggtggccgcccgtatgcgggcgaacgtgagggtgcacaggagcggggtcagggggtgcgtcacgctccggaggtggacgatcgcgcagtagcggcgctcgcggttaaagaaaaagagggcaaagaaggtgttcgggggcaaccgcagcgccttggggcgcgtcagatacagaaaaatctcgcagaagagggcgcgcccggggtctgggttaggaagggccacctgacacagaggctcggtgaggaccgttagacaccgaaagatcttgagccgctcgtccgcccgaacgacgcgccacacaaagacggagttgacaatgcgcgcgatagagtcgacgtccgtccccaggtcgtcgactctgtcgcgcgtgccgcgagctccggcccgggaatccggccggggcaaggtccccgggggaccaggcggcgccaggggccgccggggtcccagctgcgccatgccgggggcggggggagggcaaaccccagaggcgggggccaacggcgcggggaggagtgggtgggcgaggtggccgggggaaggcgcccgctagcgagaacggccgttcccggacgacaccttgcgacaaaacctaaggacagcggcccgcgcgacggggtccgagaggctaaggtaggccgcgatgttaatggtgaacgcaaagccgccgggaaagacaactatgccacagaggcggcgattaaaccccaggcagaggtaggcgtagctttccccgggcaggtattgctcgcagaccctgcgtggggctgtggaggggacggcctccatgaagcgacatttactctgctcgcgtttactgacgtcaccatccatcgccacggcgattggacgattgttaagccgcagcgtgtctccgcttgtgctgtagtagtcaaaaacgtaatggccgtcggagtcggcaaagcgggccgggaggtcgtcgccgagcgggacgacccgccgcccccgaccgccccgtccccccaggtgtgccaggacggccagggcatacgcggtgtgaaaaaaggcgtcgggggcggtcccctcgacggcgcgcatcaggttctcgaggagaatggggaagcgcctggtcacctcccccagccacgcgcgttggtcggggccaaagtcatagcgcaggcgctgtgagattcgagggccgccctgaagcgcggcccggatggcctggcccagggcccggaggcacgccagatgtatgcgcgcagtaaaggcgacctcggcggcgatgtcaaagggcggcaggacggggcgcgggtggcgcaggggcacctcgagcgcgggaaagcggagcagcagctccgcctgcccagcgggagacagctggtgggggcgcacgacgcgttctgcggcgcaggcctcggtcagggccgtggccagcgccgaggacagcagcggagggcgggcgcgtcgcccgccccacgccacggagttctcgtaggagacgacgacgaagcgctgcttggttccgtagtggtggcgcaggaccacggagatagaacgacggctccacagccagtccggccggtcgccgccggccagggcttcccatccgcgatccaaccactcgaccagcgaccgcggctttgcggtaccaggggtcagggttagaacgtcgttcaggatgtcctcgcccccgggcccgtggggcactggggccacaaagcggcccccgcctgggggctccagacccgccaacaccgcatctgcgtcagccgcccccatggcgcccccgctgacggcctggtgaaccagggcgccctggcggagccccgatgcaacgccacaggccgcacgcccggtccgagcgcggaccgggtggcggcgggtgacgtcctgcactgcccgctgaaccaacgcgaggatctcctcgttctcctgcgcgatggacacgtcctgggccgcggtcgtgtcgccgccgggggccgtcagctgctcctccggggagatgggggggtcggacgccccgacgatgggcgggtctgcgggcgcccccgcgtggggccgggccaagggctgcggacgcggggacgcgctttcccccagacccatggacaggtgggccgcagcctccttcgcggccggcggggcggcggcgccaagcagagcgacgtagcggcacaaatgccgacagacgcgcatgatgcgcgtgctgtcggccgcgtagcgcgtgttgggggggacgagctcgtcgtaactaaacagaatcacgcgggcacagctcgcccccgagccccacgcaaggcgcagcgccgccacggcgtacgggtcatagacgccctgtgcgtcacacaccacgggcaaggagacgaacaaccccccggcgctggacgcacgcggaaggaggccagggtgtgccggcacgacgggggccagaagctcccccaccgcatccgcgggcacgtaggcggcaaacgccgtgcaccacggggtacagtcgccggtggcatgagcccgagtctggatttcgacctggaagtttgcggccgtcccgagtccggggcggccgcgcatcagggcggccagagggattcccgcggccgccaggcactcgctggatatgatgacgtgaaccaaagacgagggccgacccgggacgtggccgagatcgtactggacctcgttggccaagtgcgcgttcatggttcgggggtgggtgtgggtgtgtaggcgatgcgggtcccccgagtccgcgggaagggcgcgggtttggcgcgcgtatgcgtattcgccaacggaggcgtgcgtgcttatgcgcggcgcgtttcttctgtctccagggaatccgaggccaggactttaacctgctctttgtcgacgaggccaactttattcgcccggatgcggtccagacgattatgggctttctcaaccaggccaactgcaagattatcttcgtgtcgtccaccaacaccgggaaggccagtacgagctttttgtacaacctccgcggggccgccgacgagcttctcaacgtggtgacctatatatgcgatgatcacatgccgcgggtggtgacgcacacaaacgccacggcctgttcttgttatatcctcaacaagcccgttttcatcacgatggacggggcggttcgccggaccgccgatttgtttctggccgattccttcatgcaggagatcatcgggggccaggccagggagaccggcgacgaccggcccgttctgaccaagtctgcgggggagcggtttctgttgtaccgcccctcgaccaccaccaacagcggcctcatggcccccgatttgtacgtgtacgtggatcccgcgttcacggccaacacccgagcctccgggaccggcgtcgctgtcgtcgggcggtaccgcgacgattatatcatcttcgccctggagcacttttttctccgcgcgctcacgggctcggcccccgccgacatcgcccgctgcgtcgtccacagtctgacgcaggtcctggccctgcatcccggggcgtttcgcggcgtccgggtggcggtcgagggaaatagcagccaggactcggccgtcgccatcgccacgcacgtgcacacagagatgcaccgcctactggcctcggagggggccgacgcgggctcgggccccgagcttctcttctaccactgcgagcctcccgggagcgcggtgctgtacccctttttcctgctcaacaaacagaagacgcccgcctttgaacactttattaaaaagtttaactccgggggcgtcatggcctcccaggagatcgtttccgcgacggtgcgcctgcagaccgacccggtcgagtatctgctcgagcagctgaataacctcaccgaaaccgtctcccccaacacggacgtccgtacgtattccggaaaacggaacggcgcctcggatgaccttatggtcgccgtcattatggccatctaccttgcggcccaggccggacctccgcacacattcgctcccatcacacgcgtttcgtgagcgcccaataaacacacccaggtatgctacgcacgaccacggtgtcgcctgttaagggggggggaagggggtgttggcgggaagcgtgggaacacgggggattctctcacgaccggcaccagtaccacccccctgtgaacacagaaaccccaacccaaatcccataaacatacgacacacaggcatattttggaatttcttaggtttttatttatttaggtatgctggggtttctccctggatgcccacccccccccccccccgtgggtctagccgggccttagggatagcgtataacgggggccatgtctccggaccgcacaacggccgcgccgtcaaaggtgcacacccgaaccacgggagccagggccaaggtgtctcctagttggcccgcgtgggtcagccaggcgacgagcgcctcgtagagcggcagccttcgctctccatcctgcatcagggccggggcttcggggtgaatgagctgggcggcctcccgcgtgacactctgcatctgcaggagagcgttcacgtacccgtcctgggcacttagcgcaaagagccgggggattagcgtaaggatgatggtggttccctccgtgatcgagtaaaccatgttaaggaccagcgatcgcagctcggcgtttacggggccgagttgttggacgtccgccagcagcgagaggcgactcccgttgtagtacagcacgttgaggtctggcagccctccggggtttctggggctggggttcaggtcccggatgcccctggccacgagccgcgccacgatttcgcgcgccaggggcgatggaagcggaacgggaaaccgcaacgtgaggtccagcgaatccaggcgcacgtccgtcgcttggccctcgaacacgggcgggacgaggctgatggggtccccgttacagagatctacgggggaggtgttgcgaaggttaacggtgccggcgtgggtgaggcccacgtccagggggcaggcgacgattcgcgtgggaagcacccgggtgatgaccgcggggaagcgccttcggtacgccagcaacagccccaacgtgtcgggactgacgcctccggagacgaaggattcgtgcgccacgtcggccagcgtcagttgccggcggatggtcggcaggaataccacccgcccttcgcagcgctgcagcgccgccgcatcggggcgcgagatgcccgagggtatcgcgatgtcagtttcaaagccgtccgccagcatggcgccgatccacgcggcagggagtgcagtggtggttcgggtggcgggaggagcgcggtgggggtcagcggcgtagcagagacgggcgaccaacctcgcataggacggggggtgggtcttagggggttgggaggcgacagggaccccagagcatgcgcggggaggtctgtcgggcccagacgcaccgagagcgaatccgtccatggagtcccggcctgggttttatggggcccggccctcggaatcgcggcttgtcggcggggacaaagggggcggggctagggggcttgcggaaacagaagacgtgtgggataaaagaatcgcactaccccaaggaagggcggggcggtttattacagagccagtcccttgagcggggatgcgtcatagacgagatactgcgcgaagtgggtctcccgcgcgtgggcttccccgttgcgggcgctgcggaggagggcggggtcgctggcgcaggtgagcgggtaggcctcctgaaacaggccacacgggtcctccacgagttcgcggcaccccggggggcgcttaaactgtacgtcgctggcggcggtggccgtggacaccgccgaacccgtctccacgatcaggcgctccaggcagcgatgtttggcggcgatgtcggccgacgtaaagaacttaaagcaggggctgagcaccggcgaggccccgttgaggtggtaggccccgttatagagcaggtccccgtacgaaaatcgctgcgacgcccacgggttggccgtggccgcgaaggcccgggacgggtcgctctggccgtggtcgtacatgagggcggtgacatccccctccttgtcccccgcgtaaacgcccccggcggcgcgtccccgggggttgcagggccggcggaagtagttgacgtcggtcgacacgggggtggcgataaactcacacacggcgtcctggccgtggtccatccctgcgcgccgcggcacctgggcgcacccgaacacggggacgggctgggccggccccaggcggtttcccgccacgaccgcgttccgcaggtacacggctgccgcgttgtccagtagagggggagccccgcggcccaggtaaaagttttggggaaggttgcccatgtcggtgacggggttgcggacggttgccgtggccacgacggcggtgtagcccacgcccaggtccacgttcccgcgcggctgggtgagcgtgaagtttacccccccgccagtttcatgccgggccacctggagctggcccaggaagtacgcctccgacgcgcgctccgagaacagcacgttctcagtcacaaagcggtcctgtcggacgacggtgaacccaaacccgggatggaggcccgtcttgagctgatgatgcaaggccacgggactgatcttgaagtaccccgccatgagcgcgtaggtcagcgcgttctccccggccgcgctctcgcggacgtgctgcacgacgggctgtcggatcgacgaaaagtagttggcccccagagccggggggaccagggggacctgccgcgacaggtcgcgcagggccggggggaaattgggcgcgttcgccacgtggtcggccccggcgaacagcgcgtggacggggagggggtaaaaatagtcgccattttggatggtatggtccagatgctggggggccatcagcaggattccggcgtgcaacgccccgtcgaatatgcgcatgttggtggtggacgcggtgttggcgcccgcgtcgggcgccgccgagcagagcagcgccgttgtgcgttcggccatgttgtgggccagcacctgcagcgtgagcatggcgggcccgtccactaccacgcgcccgttgtgaaacatggcgttgaccgtgttggccaccagattggccgggtgcagggggtgcgcggggtccgtcacggggtcgctggggcaatcctcgccgggggtgatctccgggaccaccatgttctgcagggtggcgtatacgcggtcgaagcgaacccccgcggtgcagcagcggccccgcgagaaggcgggcaccatcacgtagtagtaaatcttgtggtgcacggtccagtccgccccccggtgcggccggtcgtccgcggcgtccgcggctcgggcctgggtgttgtgcagcagctggccgtcgttgcggttgaagtccgcggtcgccacgttacacgccgctgcgtacacggggtcgtggccccccgcgctaacccggcagtcgcgatggcggtccagggccgcgcgccgcatcagggcgtcgcagtcccacacgaggggtggcagcagcgccgggtctcgcattaggtgattcagttcggcttgcgcctgcccgcccagttccgggccggtcagggtaaagtcatcaaccagctgggccagggcctcgacgtgcgccaccaggtcccggtacacggccatgcactcctcgggaaggtctcccccgaggtaggtcacgacgtacgagaccagcgagtagtcgttcacgaacgccgcgcaccgcgtgttgttccagtagctggtgatgcactggaccacgagccgggccagggcgcagaagacgtgctcgctgccgtgtatggcggcctgcagcaggtaaaacaccgccgggtagttgcggtcttcgaacgccccgcgaacggcggcgatggtggcgggggccatggcgtggcgtcccacccccagctccaggccccgggcgtcccggaacgccgccggacatagcgccaggggcaagttgccgttcaccacgcgccaggtggcctggatctcccccgggccggccgggggaacgtccccccccggcagctccacgtcggccacccccacgaagaagtcgaacgcggggtgcagctcaagagccaggttggcgttgtcgggctgcataaactgctccggggtcatctggccttccgcgacccatcggacccgcccgtgggccaggcgctgcccccaggcgttcaaaaacagctgctgcatgtctgcggcggggccggccggggccgccacgtacgccccgtacggattggcggcttcgacggggtcgcggttaaggcccccgaccgccgcgtcaacgttcatcagcgaagggtggcacacggtcccgatcgcgtgttccagagacaggcgcagcacctggcggtccttcccccaaaaaaacagctggcggggcgggaaggcgcggggatccgggtggccgggggcggggactaggtccccggcgtgcgcggcaaaccgttccatgaccggattgaacaggcccaggggcaggacgaacgtcaggtccatggcgcccaccagggggtagggaacgttggtggcggcgtagatgcgcttctccagggcctccaaaaagatcagcttctcgccgatggacaccagatccgcgcgcacgcgcgtcgtctggggggcgctctcgagctcgtccagcgtctgccggttcaggtcgagctgctcctcctgcatctccagcaggtggcggcccacgtcgtccagacttcgcacggccttgcccatcacgagcgccgtgaccaggttggccccgttcaggaccatctcgccgtacgtcaccggcacgtcggcttcggtgtcctccactttcaggaaggactgcaggaggcgctgtttgatcggggcggtggtgacgagcaccccgtcgaccggacgcccgcgcgtgtcggcatgcgtcagacggggcacggccacggagggctgcgtggccgtggtgaggtccacgagccaggcctcgacggcctcccggcggtggcccgccttgcccaggaaaaagctcgtctcgcagaagcttcgctttagctcggcgaccagggtcgcccgggccaccctggtggccaggcggccgttgtccaggtatcgttgcatcggcaacaacaaagccaggggcggcgccttttccagcagcacgtgcagcatctggtcggccgtgccgcgctcaaacgccccgaggacggcctggacgttgcgagcgagctgttggatggcgcgcaactggcgatgcgcgctgatacccgtcccgtccagggcctcccccgtgagcagggcgatggcctcggtggccaggctgaaggcggcgttcagggcccggcggtcgataatcttggtcatgtaattgtgtgtgggttgctcgatggggtgcgggccgtcgcgggcaatcagcggctggtggacctcgaactgtacgcgcccctcgttcatgtaggccagctccggaaacttggtacacacgcacgccaccgacaacccgagctccagaaagcgcacgagcgacagggtgttgcaatacgaccccaacagggcgtcgaactcgacgtcatacaggctgtttgcatcggagcgcacgcgggaaaaaaaatcgaacaggcgtcgatgcgacgccacctcgatcgtgctaaggagggacccggtcggcaccatggccgcggcataccggtatcccggagggtcgcggttgggagcggccatggggtcgcgtggagatcggctgtctctagcgatattggcccggggaggctaagatccaccccaacgcccggccacccgtgtacgtgcccgacggcccaaggtccaccgaaagacacgacgggcccggacccaaaaaggcgggggatgctgtgtgagaggccgggtgtcggtcgggggggaaaggcaccgggagaaggctgcggcctcgttccaggagaacccagtgtccccaacagacccggggacgtgggatcccaggccttatataccccccccgccccacccccgttagaacgcgacgggtgcattcaagatggccctggtccaaaagcgtgccaggaagaaattggcagaggcggcaaagctgtccgccgccgccacccacatcgaggccccggccgcgcaggctatccccagggcccgtgtgcgcaggggatcggtgggcggcagcatttggttggtggcgataaagtggaaaagcccgtccggactgaaggtctcgtgggcggcggcgaacaaggcacacagggccgtgcctcccaaaaacacggacatcccccaaaacacgggcgccgacaacggcagacgatccctcttgatgttaacgtacaggaggagcgcccgcaccgcccacgtaacgtagtagccgacgatggcggccaggatacaggccggcgccaccacccttccggtcagcccgtaatacatgcccgctgccaccatctccaacggcttcaggaccaaaaacgaccaaaggaacagaatcacgcgctttgaaaagaccggctgggtatggggcggaagacgcgagtatgccgaactgacaaaaaagtcagaggtgccgtacgaggacaatgaaaactgttcctccagtggcagttctccctcctcccccccaaaggcggcctcgtcgaccagatctcgatccaccagaggaaggtcatcccgcatggtcatggggtgtgcggtggaggtggggagaccgaaaccgcaaagggtcgcttacgtcagcaggatcccgagatcaaagacacccgggttcttgcacaaacaccacccgggttgcatccgcggaggcgagtgttttgataaggccgttccgcgccttgatataacctttgatgttgaccacaaaacccggaatttacgcctacgccccaatgcccacgcaagatgaggtaggtaaccccccccccgtgggtgtgacgttgcgtttagttcattggaggccaaggggaaaatggggtggggaggaaacggaaaacccagtaggccgtgttgggaacacgcccggggttgtcctcaaaaggcagggtccatactacggaagccgtcgttgtattcgagacctgcctgtgcgacgcacgtcggggttgcctgtgtccggttcggccccaccgcgtgcggcacgcacgaggacgagtccgcgtgctttattggcgttccaagcgttgccctccagtttctgttgtcggtgttcccccatacccacgcccacatccaccgtagggggcctctgggccgtgtcacgtcgccgcccgcgatggagcttagctacgccaccaccatgcactaccgggacgttgtgttttacgtcacaacggaccgaaaccgggcctactttgtgtgcggggggtgtgtttattccgtggggcggccgtgtgcctcgcagcccggggagattgccaagtttggtctggtcgttcgagggacaggcccagacgaccgcgtggtcgccaactatgtacgaagcgagctccgacaacgcggcctgcaggacgtgcgtcccattggggaggacgaggtgtttctggacagcgtgtgtcttctaaacccgaacgtgagctccgagctggatgtgattaacacgaacgacgtggaagtgctggacgaatgtctggccgagtactgcacctcgctgcgaaccagcccgggtgtgctaatatccgggctgcgcgtgcgggcgcaggacagaatcatcgagttgtttgaacacccaacgatagtcaacgtttcctcgcactttgtgtataccccgtccccatacgtgttcgccctggcccaggcgcacctcccccggctcccgagctcgctggaggccctggtgagcggcctgtttgacggcatccccgccccacgccagccacttgacgcccacaacccgcgcacggatgtggttatcacgggccgccgcgccccacgacccatcgccgggtcgggggcggggtcggggggcgcgggcgccaagcgggccaccgtcagcgagttcgtgcaagtcaaacacattgaccgcgtgggccccgctggcgtttcgccggcgcctccgccaaacaacaccgactcaagttccctggtgcccggggcccaggattccgccccgcccggccccacgctaagggagctgtggtgggtgttttatgccgcagaccgggcgctggaggagccccgcgccgactctggcctcacccgcgaggaggtacgtgccgtacgtgggttccgggagcaggcgtggaaactgtttggctccgcgggggccccgcgggcgtttatcggggccgcgttgggcctgagccccctccaaaagctagccgtttactactatatcatccaccgagagaggcgcctgtcccccttccccgcgctagtccggctcgtaggccggtacacacagcgccacggcctgtacgtccctcggcccgacgacccagtcttggccgatgccatcaacgggctgtttcgcgacgcgctggcggccggaaccacagccgagcagctcctcatgttcgaccttctccccccaaaggacgtgccggtgggaagcgacgtgcaggccgacagcaccgctctgctgcgctttatagaatcgcaacgtctcgccgtccccgggggggtgatctcccccgagcacgtcgcgtaccttggtgcgttcctgagcgtgctgtacgctggccgcgggcgcatgtccgcagccacgcacaccgcgcggctgacaggggtgacctccctggtgctagcggtgggtgacgtggaccgtctttccgcgtttgaccgcggagcggcgggcgcggccagccgcacgcgggccgccgggtacctggatgtgcttcttaccgttcgtctcgctcgctcccaacacggacagtctgtgtaacagaccccaataaacgtatgtcgctaccacacccttgtgtgtcaatggacgcctctccgggggggaagggaaaacaaagaggggctgggggagcggcaccaccggggcctgaacaaacaaaccacagacacggttacagtttattcggtcgggcggagaaacggccgaagccacgccccctttattcgcgtctccaaaaaaacgggacacttgtccggagaacctttaggatgccagccagggcggcggtaatcataaccacgcccagcgcagaggcggccagaaacccgggcgcaattgcggccacgggctgcgtgtcaaaggctagcaaatgaatgacggttccgtttggaaatagcaacaaggccgtggacggcacgtcgctcgaaaacacgcttggggcgccctccgtcggcccggcggcgatttgctgctgtgtgttgtccgtatccaccagcaacacagacatgacctccccggccggggtgtagcgcataaacacggcccccacgagccccaggtcgcgctggttttgggtgcgcaccagccgcttggactcgatatcccgggtggagccttcgcatgtcgcggtgaggtaggttaggaacagtgggcgtcggacgtcgacgccggtgagcttgtagccgatcccccggggcagaggggagtgggtgacgacgtagctggcgttgtgggtgatgggtaccaggatccgtggctcgacgttggcagactgccccccgcaccgatgtgaggcctcagggacgaaggcgcggatcagggcgttgtagtgtgcccagcgcgtcagggtcgaggcgaggccgtgggtctgctgggccaggacttcgaccggggtctcggatcgggtggcttgagccagcgcgtccaggataaacacgctctcgtctagatcaaagcgcagggaggccgcgcatggcgaaaagtggtccggaagccaaaagagggttttctggtggtcggcccgggccagcgcggtccggaggtcggcgttggtcgctgcggcgacgtcggacgtacacagggccgaggctatcagaaggctccggcgggcgcgttcccgctgcaccgccgaggggacgcccgccaagaacggctgccggaggacagccgaggcgtaaaatagcgcccggtggacgaccggggtggtcagcacgcggccccctagaaactcggcatacagggcgtcgatgagatgggctgcgctgggcgccactgcgtcgtacgccgaggggctatccagcacgaaggccagctgatagcccagcgcgtgtaatgccaagctctgttcgcgctccagaatctcggccaccaggtgctggagccgagcctctagctgcaggcgggccgtgggatccaagactgacacattaaaaaacacagaatccgcggcacagcccgcggccccgcgggcggccaacccggcaagcgcgcgcgagtgggccaaaaagcctagcaggtcggagaggcagaccgcgccgtttgcgtgggcggcgttcacgaaagcaaaacccgacgtcgcgagcagccccgttaggcgccagaagagagggggacgcgggccctgctcggcgcccgcgtcccccgagaaaaactccgcgtatgcccgcgacaggaactgggcgtagttcgtgccctcctccgggtagccgcccacgcggcggagggcgtccagcgcggagccgttgtcggcccgcgtcagggaccctaggacaaagacccgataccgggggccgcccgggggcccgggaagagcccccggggggttttcgtccgcggggtccccgacccgatctagcgtctggcccgcggggaccaccatcacttccaccggagggctgtcgtgcatggatatcacgagccccatgaattcccgcccgtagcgcgcgcgcaccagcgcggcatcgcacccgagcaccagctcccccgtcgtccagatgcccacgggccacgtcgaggccgacggggagaaatacacgtacctacctggggatctcaacaggccccgggtggccaaccaggtcgtggacgcgttgtgcaggtgcgtgatgtccagctccgtcgtcgggtgccgccgggccccaaccggcggtcgggggggcggtgtatcacgcggcccgctcgggtggctcgccgtcgccacgttgtctccccgcgggaacgtcagggcctcggggtcagggacggccgaaaacgttacccaggcccgggaacgcagcaacacggaggcggttggattgtgcaagagacccttaaggggggcgaccgcggggggaggctgggcggtcggctcgaccgtgatgggggcgggcaggctcgcgttcgggggccggccgagcaggtaggtcttcgagatgtaaagcagctggccggggtcccgcggaaactcggccgtggtgaccaatacaaaacaaaagcgctcctcgtaccagcgaagaaggggcagagatgccgtagtcaggtttagttcgtccggcggcgccagaaatccgcgcggtggtttttgggggtcgggggtgtttggcagccacagacgcccggtgttcgtgtcgcgccagtacatgcggtccatgcccaggccatccaaaaaccatgggtctgtctgctcagtccagtcgtggacctgaccccacgcaacgcccaaaagaataacccccacgaaccataaaccattccccatgggggaccccgtccctaacccacggggcccgtggctatggcagggcttgccgccccgacgttggctgcgagccctgggccttcacccgaacttgggggttggggtggggaaaaggaagaaacgcgggcgtattggccccaatggggtctcggtggggtatcgacagagtgccagccctgggaccgaaccccgcgtttatgaacaaacgacccaacacccgtgcgttttattctgtctttttatttccgtcatagcgcgggttccttccggtattgtctccttccgtgtttcagttagcctcccccatctcccgggcaaacgtgcgcgccaggtcgcagatcgtcggtatggagcctggggtggtgacgtgggtctggaccatcccggaggtaagttgcagcagggcgtcccggcagccggcgggcgattggtcgtaatccaggataaagacgtgcatgggacggaggcgtttggccaagacgtccaaggcccaggcaaacacgttatacaggtcgccgttgggggccagcaactcgggggcccgaaacagggtaaataacgtgtccccgatatggggtcgtgggcccgcgttgctctggggctcggcaccctggggcggcacggccgtccccgaaagctgtccccaatcctcccgccacgacccgccgccctgcagataccgcaccgtattggcaagcagcccgtaaacgcggcgaatcgcggccaacatagccaggtcaagccgctcgccggggcgctggcgtttggccaggcggtcgatgtgtctgtcctccggaagggcccccaacacgatgtttgtgccgggcaaggtcggcgggatgagggccacgaacgccagcacggcctggggggtcatgctgcccataaggtatcgcgcggccgggtagcacaggagggcggcgatgggatggcggtcgaagatgagggtgagggccgggggcggggcatgtgagctcccagcctcccccccgatatgaggagccagaacggcgtcggtcacggcataaggcatgcccattgttatctgggcgcttgtcattaccaccgccgcgtccccggccgatatctcaccctggtcgaggcggtgttgtgtggtgtagatgttcgcgattgtctcggaagcccccagcacctgccagtaagtcatcggctcgggtacgtagacgatatcgtcgcgcgaacccagggccaccagcagttgcgtggtggtggttttccccatcccgtgaggaccgtctatataaacccgcagtagcgtgggcattttctgctccaggcggacttccgtggcttcttgctgccggcgagggcgcaacgccgtacgtcggttgctatggccgcgagaacgcgcagcctggtcgaacgcagacgcgtgttgatggcaggggtacgaagccatacgcgcttctacaaggcgcttgccaaagaggtgcgggagtttcacgccaccaagatctgcggcacgctgttgacgctgttaagcgggtcgctgcagggtcgctcggtgttcgaggccacacgcgtcaccttaatatgcgaagtggacctgggaccgcgccgccccgactgcatctgcgtgttcgaattcgccaatgacaagacgctgggcggggtttgtgtcatcatagaactaaagacatgcaaatatatttcttccggggacaccgccagcaaacgcgagcaacgggccacggggatgaagcagctgcgccactccctgaagctcctgcagtccctcgcgcctccgggtgacaagatagtgtacctgtgccccgtcctggtgtttgtcgcccaacggacgctccgcgtcagccgcgtgacccggctcgtcccgcagaaggtctccggtaatatcaccgcagtcgtgcggatgctccagagcctgtccacgtatacggtccccatggagcctaggacccagcgagcccgtcgccgccgcggcggcgctgcccgggggtctgcgagcagaccgaaaaggtcacactctggggcgcgcgacccgcccgagccagcggcccgccaggtaccacccgccgaccaaacccccgcctccacggagggcgggggggtgcttaagaggatcgcggcgctcttctgcgtgcccgtggccaccaagaccaaaccccgagctgcctccgaatgagagtgtttcgttccttccccctccccccgcgtcagacaaaccctaaccaccgcttaagcggcccccgcgaggtccgaagactcatttggatccggcgggagccacctgacaacagcccccgggtttccccacgccagacgccggtccgctgtgccatcgctccccttcatcccacccccatcttgtccccaaataaaacaaggtctggtagttaggacaacgaccgcagttctcgtgtgttattgtcgctctccgcctctcgcagatggacccgtattgcccatttgacgctctggacgtctgggaacacaggcgcttcatagtcgccgattcccgaaacttcatcacccccgagttcccccgggacttttggatgtcgcccgtctttaacctcccccgggagacggcggcggagcaggtggtcgtcctgcaggcccagcgcacagcggctgccgctgccctggagaacgccgccatgcaggcggccgagctccccgtcgatatcgagcgccggttacgcccgatcgaacggaacgtgcacgagatcgcaggcgccctggaggcgctggagacggcggcggccgccgccgaagaggcggatgccgcgcgcggggatgagccggcgggtgggggcgacgggggggcgcccccgggtctggccgtcgcggagatggaggtccagatcgtgcgcaacgacccgccgctacgatacgacaccaacctccccgtggatctgctacatatggtgtacgcgggccgcggggcgaccggctcgtcgggggtggtgttcgggacctggtaccgcactatccaggaccgcaccatcacggactttcccctgaccacccgcagtgccgactttcgggacggccggatgtccaagaccttcatgacggcgctggtcctgtccctgcagtcgtgcggccggctgtatgtgggccagcgccactattccgccttcgagtgcgccgtgttgtgtctctacctgctgtaccgaaacacgcacggggccgccgacgatagcgaccgcgctccggtcacgttcggggatctgctgggccggctgccccgctacctggcgtgcctggccgcggtgatcgggaccgagggcggccggccacagtaccgctaccgcgacgacaagctccccaagacgcagttcgcggccggcgggggccgctacgaacacggagcgctggcgtcgcacatcgtgatcgccacgctgatgcaccacggggtgctcccggcggccccgggggacgtcccccgggacgcgagcacccacgttaaccccgacggcgtggcgcaccacgacgacataaaccgcgccgccgccgcgttcctcagccggggccacaacctattcctgtgggaggaccagactctgctgcgggcaaccgcgaacaccataacggccctgggcgttatccagcggctcctcgcgaacggcaacgtgtacgcggaccgcctcaacaaccgcctgcagctgggcatgctgatccccggagccgtcccttcggaggccatcgcccgtggggcctccgggtccgactcgggggccatcaagagcggagacaacaatctggaggcgctatgtgccaattacgtgcttccgctgtaccgggccgacccggcggtcgagctgacccagctgtttcccggcctggccgccctgtgtcttgacgcccaggcggggcggccggtcgggtcgacgcggcgggtggtggatatgtcatcgggggcccgccaggcggcgctggtgcgcctcaccgccctggaactcatcaaccgcacccgcacaaaccccacccccgtgggggaggttatccacgcccacgacgccctggcgatccaatacgaacaggggcttggcctgctggcgcagcaggcacgcattggcttgggctccaacaccaagcgtttctccgcgttcaacgttagcagcgactacgacatgttgtactttttatgtctggggttcattccacagtacctgtcggcggtttagtgggtggtgggcgaggggggagggggcattagggagaaagaacaagagcctccgttgggttttctttgtgcctgtactcaaaaggtcataccccgtaaacggcgggctccagtcccggcccggcggttggcgtgaacgcaacggcgggagctgggttagcgtttagtttagcattcgctctcgcctttccgcccgcccccgaccgttgagcctttttttttttcgtccaccaaagtctctgtgggtgcgcgcatggcagccgatgccccgggagaccggatggaggagcccctgccagacagggccgtgcccatttacgtggctgggtttttggccctgtatgacagcggggactcgggcgagttggcattggatccggatacggtgcgggcggccctgcctccggataacccactcccgattaacgtggaccaccgcgctggctgcgaggtggggcgggtgctggccgtggtcgacgacccccgcgggccgttttttgtgggactgatcgcctgcgtgcaactggagcgcgtcctcgagacggccgccagcgctgcgattttcgagcgccgcgggccgccgctctcccgggaggagcgcctgttgtacctgatcaccaactacctgccctcggtctccctggccacaaaacgcctggggggcgaggcgcaccccgatcgcacgctgttcgcgcacgtagcgctgtgcgcgatcgggcggcgccttggcactatcgtcacctacgacaccggtctcgacgccgccatcgcgccctttcgccacctgtcgccggcgtctcgcgagggggcgcggcgactggccgccgaggccgagctcgcgctatccggacgcacctgggcgcccggcgtggaggcgctgacccacacgctgctttccaccgccgttaacaacatgatgctgcgggaccgctggagcctggtggccgagcggcggcggcaggccgggatcgccggacacacctacctccaggcgagcgaaaaattcaaaatgtggggggcggagcctgtttccgcgccggcgcgcgggtataagaacggggccccggagtccacggacataccgcccggctcgatcgctgccgcgccgcagggtgaccggtgcccaatcgtccgtcagcgcggggtcgcctcgcccccggtactgccccccatgaaccccgttccaacatcgggcaccccggcccccgcgccgcccggcgacgggagctacctgtggatcccggcctcccattacaaccagctcgtcgccggccacgccgcgccccaaccccagccgcattccgcgtttggtttcccggctgcggcgggggccgtggcctatgggcctcacggcgcgggtctttcccagcattaccctccccacgtcgcccatcagtatcccggggtgctgttctcgggacccagcccactcgaggcgcagatagccgcgttggtgggggccatagccgcggaccgccaggcgggcggtcagccggccgcgggagaccctggggtccgggggtcgggaaagcgtcgccggtacgaggcggggccgtcggagtcctactgcgaccaggacgaaccggacgcggactacccgtactaccccggggaggctcgaggcgggccgcgcggggtcgactctcggcgcgcggcccgccagtctcccgggaccaacgagaccatcacggcgctgatgggggcggtgacgtctctgcagcaggaactggcgcacatgcgggctcggaccagcgccccctatggaatgtacacgccggtggcgcactatcgccctcaggtgggggagccggaaccaacaacgacccacccggccctttgtcccccggaggccgtgtatcgccccccaccacacagcgccccctacggtcctccccagggtccggcgtcccatgcccccactcccccgtatgccccagctgcctgcccgccaggcccgccaccgcccccatgtccttccacccagacgcgcgcccctctaccgacggagcccgcgttcccccccgccgccaccggatcccaaccggaggcatccaacgcggaggccggggcccttgtcaacgccagcagcgcagcacacgtggacgttgacacggcccgcgccgccgatttgttcgtctctcagatgatgggggcccgctgattcgccccggtctttggtaccatgggatgtcttactgtatatctttttaaataaaccaggtaataccaaataagacccattggtgtatgttcttttttttttattgggaggggcgggtaggcgggtagctttacaatgcaaaagcctttgacgtggaggaaggcgtgggggggaggaaatcggcactgaccaagggggtccgttttgtcacgggaaaggaaagaggaaacaggccgcggacacccgggggagtttatgtgttcctttttctttcttcccacacacacacaaaaggcgtaccaaacaaaaaaaccaaaagatgcgcatgcggtttaacacccgtggtttttatttacaacaaaccccccgtcacaggtcgtcctcgtcggcgtcaccgtctttgttgggaacttgggtgtagttggtgttgcggcgcttgcgcatgaccatgtcggtgaccttggcgctgagcagcgcgctcgtgcccttcttcttggccttgtgttccgtgcgctccatggccgacaccagggccatgtaccgtatcatctccctggcctcggctagcttggcctcgtcaaagtcgccgccctcctcgccctccccggacgcgtccgggttggtggggttcttgagctccttggtggttagagggtacagggccttcatggggttgctctgcagccgcatgacgtaacgaaaggcgaagaaggccgccgccaggccggccaggaccaacagacccacggccagcgccccaaaggggttggacatgaaggaggacacgcccgacacggccgataccacgccgcccacgatgcccatcaccaccttgccgaccgcgcgccccaggtcgcccatcccctcgaagaacgcgcccaggcccgcgaacatggcggcgttggcgtcggcgtggatgaccgtgtcgatgtcggcgaagcgcaggtcgtgcagctggttgcggcgctggacctccgtgtagtccagcaggccgctgtccttgatctcgtggcgggtgtacacctccagggggacaaactcgtgatcctccagcatggtgatgttgaggtcgatgaaggtgctgacggtggtgatgtcggcgcggctcagctggtgggagtacgcgtactcctcgaagtacacgtagcccccaccgaaggtgaagtagcgccggtgtcccacggtgcacggctcgatcgcatcgcgcgtcagccgcagctcgttgttctcccccagctgcccctcgaccaacgggccctggtcttcgtaccgaaagctgaccagggggcggctgtagcaggccccgggccgcgagctgatgcgcatcgagttttggacgatcacgttgtccgcggcgaccggcacgcacgtggagacggccatcacgtcgccgagcatccgcgcgctcacccgccggcccacggtgaccgaggcgatggtgttggggttcagcttgcgggcctcgttccacagggtcagctcgtgattctgtagctcgcaccacgcgatggcaacgcggcccaacatatcgttgacatggcgctgtatgtggttgtacgtaaactgcagccgggcgaactcgatggaggaggtggtcttgatgcgctccacggacgcgttggcgctggccccgggcggcgggggcgtggggtttgggggcttgcggctctgctctcggaggtgttcccgcacgtacagctccgcgagcgtgttgctgagaaggggctggtacgcgatcagaaagcccccattggccaggtagtactgcggctggcccaccttgatgtgcgtcgcgttgtacctgcgggcgaagatgcggtccatggcgtcgcgggcgtccttgccgatgcagtcccccaggtccacgcgcgagagcgggtactcggtcaggttggtggtgaaggtggtggatatggcgtcggaggagaatcggaaggagccgccgtactcggagcgcagcatctcgtccacttcctgccacttggtcatggtgcagaccgacgggcgctttggcacccagtcccaggccacggtgaacttgggggtcgtgagcaggttccgggtggtcggcgccgtggcccgggccttggtggtgaggtcgcgcgcgtagaagccgtcgacctgcttgaagcggtcggcggcgtagctggtgtgttcggtgtgcgacccctcccggtagccgtaaaacggggacatgtacacaaagtcgccagtcgccagcacaaactcgttgtacgggtacaccgagcgcgcgtccacctcctcgacgatgcagtttaccgtcgtcccgtaccggtggaacgcctccacccgcgaggggttgtacttgaggtcggtggtgtgccagccccggctcgtgcgggtcgcggcgttggccggtttcagctccatgtcggtctcgtggtcgtcccggtgaaacgcggtggtctccaggttgttgcgcacgtacttggccgtggaccgacagacccccttggcgttgatcttgtcgatcacctcctcgaaggggacgggggcgcggtcctcaaagatccccataaactgggagtagcggtggccgaaccacacctgcgaaacggtgacgtctttgtagtacatggtggccttgaacttgtacggggcgatgttctccttgaagaccaccgcgatgccctccgtgtagttctgaccctcgggccgggtcgggcagcggcgcggctgctcgaactgcaccaccgtggcgcccgtggggggtgggcacacgtaaaagtttgcatcggtgttctccgccttgatgtcccgcaggtgctcgcgcagggtggcgtggcccgcggcgacggtcgcgttgtcgccggcggggcgtggtggcgttgggtttttcggttttttgttcttcttcggtttcgggtcccccgttggggcggcgccaagggcgggcggcgccggagtggcagggcccccgttcgccgcctgggtcgcggccgcgaccccaggcgtgccgggggaactcggagccgccgacgccaccaggacccccagcgtcaaccccaagagcgcccatacgacgaaccaccggcgcccccacgagggggcgccctggtgcatggcgggactacgggggcccgtcgtgccccccgtcaggtagcctgggggcgaggtgctggaggaccgagtagaggatcgagaaaacgtcgcggtcgtagaccacgaccgaccgggggccgatacagccgtcgggggcgctctcgacgatggccaccagcggacagtcggagtcgtacgtgagatatacgccgggcgggtaacggtaacgaccttcggaggtcgggcggctgcagtccgggcggcgcaactcgagctccccgcaccggtagaccgaggcaaagagtgtggtggcgataatcagctcgcgaatatatcgccaggcggcgcgctgagtgggcgttattccggaaatgccgtcaaaacagtaaaacctctgaaattcgctgacggcccaatcagcacccgagccccccgcccccatgatgaaccgggcgagctcctccttcaggtgcggcaggagccccacgttctcgacgctgtaatacagcgcggtgttggggggctgggcgaagctgtgggtggagtgatcaaagaggggcccgttgacgagctcgaagaagcgatgggtgatgctggggagcagggccgggtccacctggtgtcgcaggagagacgctcgcatgaaccggtgcgcgtcgaacacgcccggcgccgagcggttgtcgatgaccgtgcccgcgcccgccgtcagggcgcagaagcgcgcgcgcgccgcaaagccgttggcgaccgcggcgaacgtcgcgggcagcacctcgccgtggacgctgacccgcagcatcttctcgagctccccgcgctgctcgcggacgcagcgccccaggctggccaacgaccgcttcgtcaggcggtccgcgtacagccgccgtcgctcccgtacgtccgcggccgcttgcgtggcgatgtccccccacgtctcgggcccctgccccccgggcccgcggcgacggtcttcgtcctcgcccccgcccccgggagctcccaacccccgtgccccttcctctacggcgacacggtccccgtcgtcgtcggggcccgcgccgcccttgggcgcgtccgccgcgccccccgcccccatgcgcgccagcacgcgacgcagcgcctcctcgtcgcactgttcggggctgacgaggcgccgcaagagcggcgtcgtcaggtggtggtcgtagcacgcgcggatgagcgcctcgatctgatcgtcgggtgacgtggcctgaccgccgattattagggcgtccaccatatccagcgccgccaggtggctcccgaacgcgcgatcgaaatgctccgcccgccgcccgaacagcgccagttccacggccaccgcggcggtctcctgctgcaactcgcgccgcgccagcgcggtcaggttgctggcaaacgcgtccatggtggtctggccggcgcggtcgccggacgcgagccagaatcgcaattcgctgatggcgtacaggccgggcgtggtggcctgaaacacgtcgtgcgcctccagcagggcgtcggcctccttgcggaccgagtcgttctcgggcgacgggtggggctgcccgtcgccccccgcggtccgggccagcgcatggtccaacacggagagcgcccgcgcgcggtcggcgtccgacagcccggcggcgtggggcaggtaccgccgcagctcgttggcgtccagccgcacctgcgcctgctgggtgacgtggttacagatacggtccgccaggcggcgggcgatcgtcgccccctggttcgccgtcacacacagttcctcgaaacagaccgcgcaggggtgggacgggtcgctaagctccggggggacgataaggcccgaccccaccgcccccaccataaactcccgaacgcgctccagcgcggcggtggcgccgcgcgagggggtgatgaggtggcagtagtttagctgctttagaaagttctcgacgtcgtgcaggaaacacagctccatatggacggtcccgccatacgtatccagcctgacccgttggtgatacggacagggtcgggccaggcccatggtctcggtgaaaaacgccgcgacgtctcccgcggtcgcgaacgtctccaggctgcccaggagccgctcgccctcgcgccacgcgtactctagcagcaactccagggtgaccgacagcggggtgagaaaggccccggcctgggcctccaggcccggcctcagacgacgccgcagcgcccgcacctgaagcgcgttcagcttcagttgggggagcttcccccgtccgatgtgggggtcgcaccgccggagcagctctatctgaaacacataggtctgcacctgcccgagcagggctaacaacttttgacgggccacggtgggctcggacaccggggcggccatctcgcggcgccgatctgtaccgcggccggagtatgcggtggaccgaggcggtccgtacgctacccggtgtctggctgagccccggggtccccctcttcggggcggcctcccgcgggcccgccgaccggcaagccgggagtcggcggcgcgtgcgtttctgttctattcccagacaccgcggagaggaatcacggcccgcccagagatatagacacggaacacaaacaagcacggatgtcgtagcaataatttattttacacacattccccgccccgccctaggttcccccaccccccaacccctcacagcatatccaacgtcaggtctccctttttgtcggggggcccctccccaaacgggtcatccccgtggaacgcccgtttgcggccggcaaatgccggtcccggggcccccgggccgccgaacggcgtcgcgttgtcgtcctcgcagccaaaatccccaaagttaaacacctccccggcgttgccgagttggctgactagggcctcggcctcgtgcgccacctccagggccgcgtccgtcgaccactcgccgttgccgcgctccagggcacgcgcggtcagctccatcatctcctcgcttaggtactcgtcctccaggagcgccagccagtcctcgatctgcagctgctgggtgcggggccccaggcttttcacggtcgccacgaacacgctactggcgacggccgccccgccctcggagataatgccccggagctgctcgcacagcgagctttcgtgcgctccgccgccgaggttcgaggccgcgcacacaaacccggcccggggacaggccaggacgaacttgcgggtgcggtcaaaaataaggagcgggcacgcgtttttgccgcccatcaggctggcccagttcccggcctgaaacacacggtcgttgccggccatgccgtagtatttgctgatgctcaaccccaacacgaccatggggcgcgccgccatgacgggccgcagcaggttgcagctggcgaacatggacgtccacgcgcccggatgcgcgtccacggcgtccatcagcgcgcgggccccggcctccaggcccgccccgccctgcgcggaccacgcggccgccgcctgcacgctggggggacggcgggaccccgcgatgatggccgtgagggtgttgatgaagtatgtcgagtgatcgcagtaccgcagaatctggtttgccatgtagtacatcgccagctcgctcacgttgttgggggccaggttaataaagtttatcgcgccgtagtccagggaaaactttttaatgaacgcgatggtctcgatgtcctcgcgcgacaggagccgggcgggaagctggttgcgttggagggccgtccagaaccactgcgggttcggctggttggaccccgggggcttgccgttggggaagatggccgcgtggaactgcttcagcagaaagcccagcggtccgaggaggatgtccacgcgcttgtcgggcttctggtaggcgctctggaggctggcgacccgcgccttggcggcctcggacgcgttggcgctcgcgcccgcgaacaacacgcggctcttgacgcgcagctccttgggaaaccccagggtcacgcgggcaacgtcgccctcgaagctgctctcggcgggggccgtctggccggccgttaggctgggggcgcagatagccgccccctccgagagcgcgaccgtcagcgttttggccgacagaaacccgttgttaaacatgtccatcacgcgccgccgcagcaccggttggaattgattgcgaaagttgcgcccctcgaccgactgcccggcgaacaccccgtggcactggctcagggccaggtcctgatacacggcgaggttggatcgccgcccgagaagctgaagcagggggcatggcccgcacgcgtacgggtccagcgtcagggacatggcgtggttggcctcgcccagaccgtcgcgaaacttgaagttcctcccctccaccaggttgcgcatcagctgctccacctcgcggtccacgacctgcctgacgttgttcaccaccgtatgcagggcctcgcggttggtgatgatggtctccagccgccccatggccgtggggaccgcctggtccacgtactgcagggtctcgagttcggccatgacgcgctcggtcgccgcgcggtacgtctcctgcatgatggtccgggcggtctcggatccgtccgcgcgcttcagggccgagaaggcggcgtagtttcccagcacgtcgcagtcgctgtacatgctgttcatggtcccgaagacgccgatggctccgcgggcggcgctggcgaacttgggatggcgcgcccggaggcgcatgagcgtcgtgtgtacgcaggcgtggcgcgtgtcgaaggtgcacaggttgcagggcacgtcggtctggttggagtccgcgacgtatcgaaacacgtccatctcctggcgcccgacgatcacgccgccgtcgcagcgctccaggtaaaacagcatcttggccagcagcgccggggaaaacccacacagcatggccaggtgctcgccggcaaattcctgggttccgccgacgaggggcgcggtgggccgaccctcgaacccgggcaccacgtgtccctcgcggtccacctgtgggttggccgccacgtgggtcccgggcacgaggaagaagcggtaaaaggagggtttgctgtggtcctttgggtccgccggaccggcgtcgtccacctcggtgagatggagggccgagttggtgctaaataccatggcccccacgagtcccgcggcgcgcgccaggtacgccccgacggcgttggcgcgggccgcggccgtgtcctggccctcgcacagcggccacgcggagatgtcggtgggcggctcgtcgaagacggccatcgacacgatagactcgagggccagggcggcgtctccggccatgacggaggccaggcgctgttcgaacccgcccgccgggcccttgccgccgccgtcgcgcccaccccgcggggtcttaccctggctggcttcgaaggccgtgaacgtaatgtcggcggggagggcggcgccctcgtggttttcgtcaaacgccaggtgggcggccgcgcgggccacggcgtccacgtttcggcatcgcagtgccacggcggcgggtcccacgaccgcctcgaacaggaggcggttgagggggcggttaaaaaacggaagcgggtaggtaaaattctccccgatcgatcggtggttggcgttgaacggctcggcgatgacccggctaaaatccggcatgaacagctgcaacggatacacgggtatgcggtgcacctccgccccgcctatggttaccttgtccgagcctcccaggtgcagaaaggtgttgttgatgcacacggcctccttgaagccctcggtaacgaccagatacaggagggcgcggtccgggtccaggccgaggcgctcacacagcgcctcccccgtcgtctcgtgtttgaggtcgccgggccggggggtgtagtccgaaaagccaaaatggcggcgtgcccgctcgcagagtcgcgtcaggtttggggcctgggtgctggggtccaggtgccggccgccgtgaaagacgtacacggacgagctgtagtgcgatggcgtcagtttcagggacaccgcggtacccccgagccccgtcgtgcgagaacccacgaccacggctacgttggcctcaaagccgctctccacggtcaggcccacgaccaggggcgccacggcgacgtcggcatcgccgctgcgcgccgacagtaacgccagaagctcgatgccttcggacggacacgcgcgagcgtacacgtatcccaggggcccgggggggaccttgatggtggttgccgtcttgggctttgtctccatgtcctcctggcaatcggtccgcaaacggaggtaatcccggcacgacgacggacgcccgacgaggtatgtctcccgagcgtcaaaatccgggggggggggcggcgacggtcaaggggagggtgggagaccggggttggggaatgaatccctacccttcacagacaacccccgggtaaccacggggtgccgatgaaccccggcggctggcaacgcggggtccctgcgagaggcacagatgcttacggtcaggtgctccgggccgggtgcgtctgatatgcggttggtatatgtacactttacctgggggcgtgccggaccgccccagcccctcccacaccccgcgcgtcatcagccggatttaaatccggctacgtcacgctcctgtcggccgccggcggtccataagcccggccggccgggccgacgcgaataaaccgggccgccggccggggcgccgcgcagcagctcgccgcccggatccgccagacaaacaaggcccttgcacatgccggcccgggcgagcctgggggtccggtaattttgccatcccacccaagcggcttttggggtttttcctcttcccccctccccacatcccccctctttaggggttcgggtgggaacaaccgcgatgttttccggtggcggcggcccgctgtcccccggaggaaagtcggcggccagggcggcgtccgggttttttgcgcccgccggccctcgcggagccggccggggacccccgccttgtttgaggcaaaacttttacaacccctacctcgccccagtcgggacgcaacagaagccgaccgggccaacccagcgccatacgtactatagcgaatgcgatgaatttcgattcatcgccccgcgggtgctggacgaggatgcccccccggagaagcgcgccggggtgcacgacggtcacctcaagcgcgcccccaaggtgtactgcgggggggacgagcgcgacgtcctccgcgtcgggtcgggcggcttctggccgcggcgctcgcgcctgtggggcggcgtggaccacgccccggcggggttcaaccccaccgtcaccgtctttcacgtgtacgacatcctggagaacgtggagcacgcgtacggcatgcgcgcggcccagttccacgcgcggtttatggacgccatcacaccgacggggaccgtcatcacgctcctgggcctgactccggaaggccaccgggtggccgttcacgtttacggcacgcggcagtacttttacatgaacaaggaggaggttgacaggcacctacaatgccgcgccccacgagatctctgcgagcgcatggccgcggccctgcgcgagtccccgggcgcgtcgttccgcggcatctccgcggaccacttcgaggcggaggtggtggagcgcaccgacgtgtactactacgagacgcgccccgctctgttttaccgcgtctacgtccgaagcgggcgcgtgctgtcgtacctgtgcgacaacttctgcccggccatcaagaagtacgagggtggggtcgacgccaccacccggttcatcctggacaaccccgggttcgtcaccttcggctggtaccgtctcaaaccgggccggaacaacacgctagcccagccgcgggccccgatggccttcgggacatccagcgacgtcgagtttaactgtacggcggacaacctggccatcgaggggggcatgagcgacctaccggcatacaagctcatgtgcttcgatatcgaatgcaaggcggggggggaggacgagctggcctttccggtggccgggcacccggaggacctggttattcagatatcctgtctgctctacgacctgtccaccaccgccctggagcacgtcctcctgttttcgctcggttcctgcgacctccccgaatcccacctgaacgagctggcggccaggggcctgcccacgcccgtggttctggaattcgacagcgaattcgagatgctgttggccttcatgacccttgtgaaacagtacggccccgagttcgtgaccgggtacaacatcatcaacttcgactggcccttcttgctggccaagctgacggacatttacaaggtccccctggacgggtacggccgcatgaacggccggggcgtgtttcgcgtgtgggacataggccagagccacttccagaagcgcagcaagataaaggtgaacggcatggtgaacatcgacatgtacgggatcataaccgacaagatcaagctctcgagctacaagctcaacgccgtggccgaagccgtcctgaaggacaagaagaaggacctgagctatcgcgacatccccgcctactacgccaccgggcccgcgcaacgcggggtgatcggcgagtactgcatacaggattccctgctggtgggccagctgttttttaagtttttgccccatctggagctctcggccgtcgcgcgcttggcgggtattaacatcacccgcaccatctacgacggccagcagatccgcgtctttacgtgcctgctgcgcctggccgaccagaagggctttattctgccggacacccaggggcgatttaggggcgccgggggggaggcgcccaagcgtccggccgcagcccgggaggacgaggagcggccagaggaggagggggaggacgaggacgaacgcgaggagggcgggggcgagcgggagccggagggcgcgcgggagaccgccggccggcacgtggggtaccagggggccagggtccttgaccccacttccgggtttcacgtgaaccccgtggtggtgttcgactttgccagcctgtaccccagcatcatccaggcccacaacctgtgcttcagcacgctctccctgagggccgacgcagtggcgcacctggaggcgggcaaggactacctggagatcgaggtgggggggcgacggctgttcttcgtcaaggctcacgtgcgagagagcctcctcagcatcctcctgcgggactggctcgccatgcgaaagcagatccgctcgcggattccccagagcagccccgaggaggccgtgctcctggacaagcagcaggccgccatcaaggtcgtgtgtaactcggtgtacgggttcacgggagtgcagcacggactcctgccgtgcctgcacgttgccgcgacggtgacgaccatcggccgcgagatgctgctcgcgacccgcgagtacgtccacgcgcgctgggcggccttcgaacagctcctggccgatttcccggaggcggccgacatgcgcgcccccgggccctattccatgcgcatcatctacggggacacggactccatatttgtgctgtgccgcggcctcacggccgccgggctgacggccatgggcgacaagatggcgagccacatctcgcgcgcgctgtttctgccccccatcaaactcgagtgcgaaaagacgttcaccaagctgctgctgatcgccaagaaaaagtacatcggcgtcatctacgggggtaagatgctcatcaagggcgtggatctggtgcgcaaaaacaactgcgcgtttatcaaccgcacctccagggccctggtcgacctgctgttttacgacgataccgtatccggagcggccgccgcgttagccgagcgccccgcagaggagtggctggcgcgacccctgcccgagggactgcaggcgttcggggccgtcctcgtagacgcccatcggcgcatcaccgacccggagagggacatccaggactttgtcctcaccgccgaactgagcagacacccgcgcgcgtacaccaacaagcgcctggcccacctgacggtgtattacaagctcatggcccgccgcgcgcaggtcccgtccatcaaggaccggatcccgtacgtgatcgtggcccagacccgcgaggtagaggagacggtcgcgcggctggccgccctccgcgagctagacgccgccgccccaggggacgagcccgccccccccgcggccctgccctccccggccaagcgcccccgggagacgccgtcgcatgccgaccccccgggaggcgcgtccaagccccgcaagctgctggtgtccgagctggccgaggatcccgcatacgccattgcccacggcgtcgccctgaacacggactattacttctcccacctgttgggggcggcgtgcgtgacattcaaggccctgtttgggaataacgccaagatcaccgagagtctgttaaaaaggtttattcccgaagtgtggcaccccccggacgacgtggccgcgcggctccgggccgcagggttcggggcggtgggtgccggcgctacggcggaggaaactcgtcgaatgttgcatagagcctttgatactctagcatgagccccccgtcgaagctgatgtccctcattttacaataaatgtctgcggccgacacggtcggaatctccgcgtccgtgggtttctctgcgttgcgccggaccacgagcacaaacgtgctctgccacacgtgggcgacgaaccggtaccccgggcacgcggtgagcatccggtctatgagccggtagtgcaggtgggcggacgtgccgggaaagatgacgtacagcatgtggcccccgtaagtggggtccgggtaaaacaacagccgcgggtcgcacgccccgcctccgcgcaggatcgtgtggacgaaaaaaagctcgggttggccaagaatcccggccaagaggtcctggaggggggcgttgtggcggtcggccaacacgaccaaggaggccaggaaggcgcgatgctcgaatatcgtgttgatctgctgcacgaaggccaggattagggcctcgcggctggtggcggcgaaccgcccgtctcccgcgttgcacgcgggacagcaacccccgatgcctaggtagtagcccatcccggagagggtcaggcagttgtcggccacggtctggtccagacagaagggcagcgacacgggagtggtcttcaccaggggcaccgagaacgagcgcacgatggcgatctcctcggagggcgtctgggcgagggcggcgaaaaggccccgatagcgctggcgctcgtgtaaacacagctcctgtttgcgggcgtgaggcggcaggctcttccgggaggcccgacgcaccacgcccagagtcccgccggccgcagaggagcacgaccgccggcgctccttgccgtgatagggcccgggccgggagccgcggcgatgggggtcggtatcatacataggtacacagggtgtgctccagggacaggagcgagatcgagtggcgtctaagcagcgcgcccgcctcacggacaaatgtggcgagcgcggtgggctttggtacaaatacctgatacgtcttgaaggtgtagatgagggcacgcaacgctatgcagacacgcccctcgaactcgttcccgcaggccagcttggccttgtggagcagcagctcgtcgggatgggtggcggggggatggccgaacagaacccaggggtcaacctccatctccgtgatggcgcacatggggtcacagaacatgtgcttaaagatggcctcgggccccgcggcccgcagcaggctcacaaaccggcccccgtccccgggctgcgtctcggggtccgcctcgagctggtcgacgacgggtacgatacagtcgaagaggctcgtgttgttttccgagtagcggaccacggaggcccggagtctgcgcagggccagccagtaagcccgcaccagtaacaggttacacagcaggcattctccgccggtgcgcccgcgcccccggccgtgtttcagcacggtggccatcagagggcccaggtcgaggtcgggctgggcatcgggttcggtaaactgcgcaaagcgcggagccacgtcgcgcgtgcgtgccccgcgatgcgcttcccaggactggcggaccgtggcgcgacgggcctccgcggcagcgcgcagctggggccccgactcccagacggcgggggtgccggcgaggagcagcaggaccagatccgcgtacgcccacgtatccggcgactcctccggctcgcggtccccggcgaccgtctcgaattccccgttgcgagcggcggcgcgcgtacagcagctgtccccgcccccgcgccgaccctccgtgcagtccaggagacgggcgcaatccttccagttcatcagcgcggtggtgagcgacggctgcgtgccggatcccgccgccgaccccgccccctcctcgcccccggaggccaaggttccgatgagggcccgggtggcagactgcgccaggaacgagtagttggagtactgcaccttggcggctcccggggagggcgagggcttgggttgcttctgggcatgccgcccgggcaccccgccgtcggtacggaagcagcagtggagaaaaaagtgccggtggatgtcgtttatggtgagggcaaagcgtgcgaaggagccgaccagggtcgccttcttggtgcgcagaaagtggcggtccatgacgtacacaaactcgaacgcggccacgaagatgctagcggcgcagtggggcgcccccaggcatttggcacagagaaacgcgtaatcggccacccactggggcgagaggcggtaggtttgcttgtacagctcgatggtgcggcagaccagacagggccggtccagcgcgaaggtgtcgatggccgccgcggaaaagggcccggtgtccaaaagcccctccccacagggatccgggggcgggttgcggggtcctccgcgcccgcccgaaccccctccgtcgcccgcccccccgcgggcccttgagggggcggtgaccacgtcggcggcgacgtcctcgtcgagcgtaccgacgggcggcacacctatcacgtgactggccgccaggagctcggcgcagagagcctcgttaagagccaggaggctgggatcgaaggccacatacgcgcgctcgaacgcccccgccttccagctgctgccgggggactcttcgcacaccgcgacgctcgccaggaccccggggggcgaagttgccatggctgggcgggaggggcgcacgcgccagcgaactttacgggacacaatccccgactgcgcgctgcggtcccagaccctggagagtctagacgcgcgctacgtctcgcgagacggcgcgcatgacgcggccgtctggttcgaggatatgacccccgccgagctggaggttgtcttcccgactacggacgccaagctgaactacctgtcgcggacgcagcggctggcctccctcctgacgtacgccgggcctataaaagcgcccgacgacgccgccgccccgcagaccccggacaccgcgtgtgtgcacggcgagctgctcgcccgcaagcgggaaagattcgcggcggtcattaaccggttcctggacctgcaccagattctgcggggctgacgcgcgcgctgttgggcgggacggttcgcgaaccctttggtgggtttacgcgggcacgcacgctcccatcgcgggcgccatggcgggactgggcaagccctaccccggccacccaggtgacgccttcgagggtctcgttcagcgaattcggcttatcgtcccatctacgttgcggggcggggacggggaggcgggcccctactctccctccagcctcccctccaggtgcgcctttcagtttcatggccatgacgggtccgacgagtcgtttcccatcgagtatgtactgcggcttatgaacgactgggccgaggtcccgtgcaacccttacctgcgcatacagaacaccggcgtgtcggtgctgtttcaggggttttttcatcgcccacacaacgcccccgggggcgcgattacgccagagcggaccaatgtgatcctgggctccaccgagacgacggggctgtccctcggcgacctggacaccatcaaggggcggctcggcctggatgcccggccgatgatggccagcatgtggatcagctgctttgtgcgcatgccccgcgtgcagctcgcgtttcggttcatgggccccgaagatgccggacggacgagacggatcctgtgccgcgccgccgagcaggctattacccgtcgccgccgaacccggcggtcccgggaggcgtacggggccgaggccgggctgggggtggctggaacgggtttccgggccaggggggacggttttggcccgctccccttgttaacccaagggccctcccgcccgtggcaccaggccctgcggggtcttaagcacctacggattggcccccccgcgctcgttttggcggcgggactcgtcctgggggccgctatttggtgggtggttggtgctggcgcgcgcctataaaaaaggacgcaccgccgccctaatcgccagtgcgttccggacgccttcgccccacacagccctcccgtccgacacccccatatcgcttcccgacctccggtcccgatggccgtcccgcaatttcaccgccccagcaccgttaccaccgatagcgtccgggcgcttggcatgcgcgggctcgtcttggccaccaataactctcagtttatcatggataacaaccacccgcacccccagggcacccaaggggccgtgcgggagtttctccgcggtcaggcggcggcgctgacggaccttggtctggcccacgcaaacaacacgtttaccccgcagcctatgttcgcgggcgacgccccggccgcctggttgcggcccgcgtttggcctgcggcgcacctattcaccgtttgtcgttcgagaaccttcgacgcccgggaccccgtgaggcccggggagttccttctggggtgttttaatcaataaaagaccacaccaacgcacgagccttgcgtttaatgtcgtgtttattcaagggagtgggatagggttcgacggttcgaaacttaacacacaaaataatcgagcgcgtctagcccagtaacatgcgcacgtgatgtaggctggtcagcacggcgtcgctgtgatgaagcagcgcccggcgggtccgctgtaactgctgttgtaggcggtaacaggcgcggatcagcaccgccagggcgctacgaccggtgcgttgcacgtagcgtcgcgacagaactgcgtttgccgatacgggcggggggccgaattgtaagcgcgtcacctcttgggagtcatcggcggataacgcactgaatggttcgttggttatgggggagtgtggttcccgagggagtgggtcgagcgcctcggcctcggaatccgagaggaacaacgaggtggtgtcggagtcttcgtcgtcagagacatacagggtctgaagcagcgacacgggcgggggggtagcgtcaatgtgtagcgcgagggaggatgcccacgaagacaccccagacaaggagctgcccgtgcgtggatttgtggacgacgcggaagccgggacggatgggcggttttgcggtgcccggaaccgaaccgccggatactccccgggtgctacatgcccgttttggggctggggttggggctggggctggggctggggttggggctggggctggggttggggctggggttggggctggggctggggttggggctggggttggggctggggttggggctggggctggggttggggttggggctggggttggggttggggctggggctggggctggggttggggctggggttggggttggggctggggttggggttggggctggggttggggctggggttggggttggggctggggttggggctggggctggggctggggctggggttggggctggggttggggctggggttggggctggggttggggctggggttggggctggggctggggttggggttggggttggggttggggctggggttggggttggggctggggttggggttggggctggggttggggctggggttggggctggggttggggctggggttggggctggggttggggctggggttggggctggggttggggctggggttggggctggggttggggctggggttggggctggggttggggctggggcgcggacaggcggttgacggtcaaatgcccccgggggcgcgcagatgtggtgggcgtggccaccggctgccgtgtagtggggcggcgggaaaccgggcctccgggcgtaacaccgccctccagcgtcaagtatgtggggggcgggcctgacgtcgggggcggggtgacgggttggaccgcgggaggcgggggagagggacctgcgggagaggatgaggtcggctcggccgggttgcggcctaaaacaggggccgtggggtcggcggggtcccagggtgaagggagggattcccgcgattcggacagcgacgcgacagcggggcgcgtaaggcgccgctgcggcccgcctacgggaaccctggggggggttggcgcgggacccgaggttagcggggggcggcggttttcgcccccgggcaaaaccgtgccggttgcgaccgggggcggaacgggatcgatagggagagcgggagaagcctggccggcgaactggggaccgagcgggaggggcacaccagacaccaaagcgtggagcgctggctctgggggtttgggaggggccggggggcgcgcgaaatcggtaaccggggcgaccgtgtcggggagggcaggcggccgccaaccctgggtggtcgcggaagcctgggtggcgcgcgccagggagcgtgcccggcggtgtcggcgcgcgcgcgacccggacgaagaagcggcagaagcgcgggaggaggcgggggggcggggggcggtggcatcggggggcgccggggaactttggggggacggcaagcgccggaagtcgtcgcgggggcccacgggcgccggccgcgtgctttcggccgggacgcccggtcgtgcttcgcgagccgtgactgccggcccagggggccgcggtgcacactgggacgtggggacggactgatcggcggtgggcgaaagggggtccggggcaaggaggggcgcggggccgccggagtcgtcagacgcgagctcctccaggccgtgaatccatgcccacatgcgaggggggacgggctcgccgggggtggcgtcggtgaatagcgtgggggccaggcttccgggccccaacgagccctccgtcccaacaaggtccgccgggccgggggtcgggttcgggaccgaggggctctggtcgtcgggggcgcgctggtacaccggatgccccgggaatagctcccccgacaggagggaggcgtcgaacggccgcccgaggatagctcgcgcgaggaaggggtcctcgtcggtggcgctggcggcgaggacgtcctcgccgcccgccacaaacgggagctcctcggtggcctcgctgccaacaaaccgcacgtcgggggggccgggggggtccgggttttcccacaacaccgcgaccggggtcatggagatgtccacgagcaccagacacggcgggccccgggcgaggggccgctcggcgatgagcgcggacaggcgcgggagctgtgccgccagacacgcgttttcaatcgggttcaggtcggcgtgcaggaggcggacggcccacgtctcgatgtcggacgacacggcatcgcgcaaggcggcgtccggcccgcgagcgcgtgagtcaaacagcgtgagacacagctccagctccgactcgcgggaaaaggccgtggtgttgcggagcgccacgacgacgggcgcgcccaggagcactgccgccagcaccaggtccatggccgtaacgcgcgccgcgggggtgcggtgggtggcggcggccggcacggcgacgtgctggcccgtgggccggtagagggcgttggggggagcggggggtgacgcctcgcgcccccccgaggggctcagcgtctgcccagattccagacgcgcggtcagaagggcgtcgaaactgtcatactctgtgtagtcgtccggaaacatgcaggtccaaagagcggccagagcggtgcttgggagacacatgcgcccgaggacgctcaccgccgccagcgcctgggcgggactcagctttcccagcgcggcgccgcgctcggttcccagctcggggaccgagcgccagggcgccagggggtcggtttcggacaacttgccgcggcgccagtctgccagccgcgtgccgaacatgaggccccgggtcggagggcctccggtcgaaaacactggcagcacgcggatgcgggcgtctggatgcggggtcaggcgctgcacgaatagcatggaatctgctgcgttctgaaacgcacgggggagggtgagatgcatgtactcgtgttggcggaccagatccaggcgccaaaaggtgtaaatgtgttccggggagctggccaccagcgccaccagcacgtcgttctcgttaaaggaaacgcggtgcctagtggagctgtggggcccgagcggcggtcccggggccgccgcgtcacccccccattccagctgggcccagcgacacccaaactcgcgcgtgagagtggtcgcgacgagggcgacgtagagctcggccgccgcatccatcgaggccccccatctcgcctggcggtggcgcacaaagcgtccgaagagctgaaagttggcggcctgggcgtcgctgagggccagctgaagccggttgatgacggtgatgacgtacatggccgtgacggtcgaggccgactccagggtgtccgtcggaagcggggggcgaatgcatgccgcctcgggacacatcagcagcgcgccgagcttgtcggtcacggccgggaagcagagcgcgtactgcagtggcgttccatccgggaccaaaaagctgggggcgaacggccgatccagcgtactggtggcctcgcgcagcaccaggggccccgggcctccgctcactcgcaggtacgcctcgccccggcggcgcagcatctgcgggtcggcctcttggccgggtggggcggacgcccgggcgcgggcgtctagggcgcgaagatccacgagcaggggcgcgggggcggcggccccccccgcgcccgtctggcctgtggccttggcgtacgcgctatataagcccatgcggcgttggatgagctcccgcgcgccccggaactcctccaccgcccatggggccaggtccccggccaccgcgtcgaattccgccaacaggccccccagggtgtcaaagttcatctcccaggccacccttggcaccacctcgtcccgcagccgggcgctcaggtcggcgtgttgggccacgcgccccccgagctcctccacggccccggcccgctcggcgctcttggcgcccaggacgccctggtacttggcgggaaggcgctcgtagtcccgctgggctcgcagccccgacacagtgttggtggtgtcctgcagggcgcgaagctgctcgcatgccgcgcgaaatccctcgggcgatttccaggcccccccgcgaacgcggccgaagcgaccccatacctcgtcccactccgcctcggcctcctcgagagacctccgcagggcctcgacgcggcgacgggtgtcgaagagcgcctgcaggcgcgcgccctgtcgcgtcaggaggcccgggccgtcgccgctggccgcgtttagcgggtgcgtctcaaaggtacgctgggcatgttccaaccaggcgaccgcctgcacgtcgagctcgcgcgccttctccgtctggtccaacagaatttcgacctgatccgcgatctcctccgccgagcgcgcctggtccagcgtcttggccacggtcgccgggacggcgaccaccttcagcagggtcttcagattggccagaccctcggcctcgagctgggcccggcgctcgcgcgcggccagcacctcccgcagccccgccgtgacccgctcggtggcttcggcgcgctgctgtttggcgcgcaccacggcgtccttggtatcggccaggtcctgtcgggtcacgaatgcgacgtagtcggcgtacgccgtgtccttcacggggctctggtccacgcgctccagcgccgccacgcacgccaccagcgcgtcctcgctcgggcagggcagggtgacccctgcccggacaagctcggcggccgccgccgggtcgttgcgcaccgcggatatctcctccgcggcggcggccaggtccagcgccacgcttccgatcgcgcgccgcgcgtcggcccggagggcgtccaggcgatcgcggatatccacgtactcggcgtagcccttttgaaaaaacggcacgtactggcgcagggccggcacgccccccaagtcttccgacaggtgtaggacggcctcgtggtagtcgataaacccgtcgttcgcctgggcccgctccagcagcccccccgccagccgcagaagccgcgccaggggctcggtgtccacccgaaacatgtcggcgtacgtgtcggccgcggccccgaaggccgcgctccagtcgatgcggtgaatggctgcgagcggggggagcatggggtggcgctggttctcgggggtgtatgggttaaacgcaagggccgtctccagggcaagggtcaccgccttggcgttggttcccagcgcctgttcggcccgctttcggaagtcccgggggttgtagccgtgcgtgcccgccagcgcctgcaggcgacggagctcgaccacgtcaaactcggcaccgctttccacgcggtccagcacggcctccacgtcggcggcccagcgctcgtggctactgcgggcgcgctgggccgccatcttctctctcaggtcggcgatggcggcctcaagttcgtcggcgcggcgtcgcgtggcgccgatgacctttcccagctcctgcagggcgcgcccgctgggggagtggtccccggccgtcccttcggcgtgcaacaggcccccgaacctgccctcgtggcccgcgaggctttcccgcgcgccggtggtcgcgcgcgtcgcggcctggatcagggaggcatgctctccctccggttggttggcggcccggcgcacctggacgacaaggtcggctgccgccgaccctaaggtcgtgagctgggcgatggccccccgcgcgtccagggccaaccgagtcgccttgacgtatcccgcggcgctgtcggccatggccgctaggaaggccaggggggaggccgggtcgctggcggccgcgcccagggccgtcaccgcgtcgaccaggacgcggtgcgcccgcacggccgcatccaccgtcgacgcggggtctgccgtcgcgacggcggcgctgccggcgttgatggcgttcgagacggcgtgggctatgatcggggcgtgatcggcgaagaactgcaagagaaacggagtctctggggcgtcggcgaacaggttcttcagcaccaccacgaagctgggatgcaagccagacagagccgtcgccgtgtccggagtcgggtgctccagggcatctcggtactgccccagcagcccccacatgtccgcccgcagcgccgccgtaacctcagggggcgccccccgaacggcctcggggaggtccgaccagcccgccggcagggaggcccgcagggtcgccaggacggccggacaggcctttagccccacaaagtcagggagggggcgcaggaccccctggagtttgtgcaagaacttctcccgggcgtcgcgggccaccttcgcccgctcccgcgctccctcgagcattgcctccagggagcgcgcgcgctcccgcaaacgggcacgcgcatcgggggcgagctctgccgtcagcttggcggcatccatggcccgcgcctgccgcagcgcttcctcggccatgcgcgtggcctctggcgacagcccgccgtcgtcggggtagggcgacgcgccgggcgcaggaacaaaggccgcgtcgctgtccagctgctggcccagggccgcatctagggcgtcgaagcgccgcagctcggccagacccgagctgcggcgcgcctgctggtcgttaatgtcgcggatgctgcgcgccagctcgtccagcggcttgcgttctatcagcccttggttggcggcgtccgtcaggacggagagccaggccgccaggtcctcgggggcgtccagcgtctggccccgctggatcagatcccgcaataggatggccgtggggctggtcgcgatcgggggcggggcgggaatggcggcgcgctgcgcgatgtcccgcgtgtgctggtcgaagacaggcagggactcgagcagctggaccacgggcacgacggcggccgaagccacgtgaaaccggcggtcgttgttgtcgctggcctgtagagccttggcgctgtatacggccccccggtaaaagtactccttaaccgcgccctcgatcgcccgacgggcctgggtccgcacctcctccagccgaacctgaacggcctcggggcccagggggggtgggcgcggagccccctgcggggccgccccggccggggcgggcattacgccgaggggcccggcgtgctgtgagaccgcgtcgaccccgcgagcgagggcgtcgagggcctcgcgcatctggcgatcctccgcctccaccctaatctcttcgccacgggcaaatttggccagagcctggactctatacagaagcggttctgggtgcgtcggggtggcgggggcaaaaagggtgtccgggtgggcctgcgagcgctccagaagccactcgccgaggcgtgtatacagattggccggcggggccgcgcgaagctgcagctccaggtccgcgagttccccgtaaaaggcgtccgtctcccgaatgacatccctagccacaaggatcagcttcgccagcgccaggcgaccgatcagagagttttcgtccagcacgtgctggacgaggggcagatgggcggccacgtcggccaggctcaggcgcgtggaggccagaaagtcccccacggccgttttccggggcagcatgctcagggtaaactccagcagggcggcggccgggccggccaccccggcctgggtgtgcgtccgggccccgttctcgatgagaaaggcgaggacgcgttcaaagaaaaaaataacacagagctccagcagccccggagaagccggatacggcgaccgtaaggcgctgatggtgagccgcgaacacgcggcgacctcgcgggccagggtggcggagcacgcggtgaacttaaccgccgtggcggccacgtttgggtgggcctcgaacagctgggcgaggtctgcgcccgggggctcgggtgagcggcgagtcttcagcgcctcgagggcctgtgaggacgccggaaccatgggcccgtcgtcctcgcccgcctcggcgaccggcggcccggccgggtcggggggtgccgaggcgaggacaggctccggaacggaggcggggaccgcggccccgacgggggttttgcctttgggggtggatttcttcttggttttggcagggggggccgagcgtttcgttttctcccccgaagtcaggtcttcgacgctggaaggcggagtccaggtgggtcggcggcgcttgggaaggccggccgagtagcgtgcccggtgccgaccaaccgggacgacgcccatctccaggacccgcatgtcgtcgtcatcttcttcggccgcctctgcggcgggggtcttgggggcggagggaggcggtggtgggatcgcggagggtgggtcggcggaggggggatccgtgggtggggtaccctttagggccaccgcccatacatcgtcgggcgcccgattcgggcgcttggcctctggttttgccgacggaccggccgtcccccgggatgtctcggaggccctgtcgtcgcgacgggcccgggtcggtggcggcgactgggcggctgtgggcgggtgtggccccggcccccctcccccctcccgggggcccacgccgacgcagggctcccccaggcccgcgatctcgccccgcagggggtgcgtgatggccacgcgccgttcgctgaacgcttcgtcctgcatgtaagtctcgctggccccgtaaagatgcagagccgcggccgtcaagtccgcaggagccgcgggttccgggcccgacggcacgaaaaacaccatggctcccgcccaccgtacgtccgggcgatcgcgggtgtaatacgtcaggtatggatacatgtcccccgcccgcactttggcgatgaacgcgggggtgccctccggaaggccatgcgggtcaaaaaggtatgcggtgtcgccgtccctgaacagccccatccctagggggccaatggttaggagcgtgtacgacagggggcgcagggcccacgggccggcgaagaacgtgtgtgcggggcattgtgtctccagcaggcctgccgcgggctccccgaagaagcccacctcgccgtatacgcgcgagaagacacagcgcagtccgccgcgcgcccctgggtactcgaggaagttggggagctcgacgatcgaacacatgcgcggcggcccagggcccgcagtcgcgcgcgtccactcgcccccctcgaccaaacatccctcgatggcctccgcggacagaacgtcgcgagggcccacatcaaatatgaggctgagaaaggacagcgacgagcgcatgcacgataccgacccccccggctccaggtcgggcgcgaactggttccgagcaccggtgaccacgatgtcgcgatcccccccgcgttccatcgtggagtgcggtggggtgcccgcgatcatatgtgccctgcgggccagagacccggcctgtttatggaccggacccccggggttagtgttgtttccgccacccacgcccccgtaccatggccccggttcccctgattaggctacgagtcgcggtgatcgcttcccaaaaaccgagctgcgtttgtctgtcttggtcttccccccccccagcccgcacaccataacaccgagaacaacacacgggggtgggcggaacataataaagctttattggtaactagttaacggcaagtccgtgggtggcgcgacggtgtcctccgggatcatctcgtcgtcctcgacgggggtgttggaatgaggcgcctcctcgcggtccacctggcgtgggccgtgcccataggcctccggcttctgtgcgtccatgggcgtaggcgcggggagactgtttccggcgtcgcggacctccaggtccctgggagcctccggtccggctaacggacgaaacgcggaagcgcgaaacacgccgtcggtgacccgcaggagctcgttcatcagtaaccaatccatactcagcgtaacggccagcccctggcgagacagatccacggagtccggaaccgcggtcgtctggcccagggggccgaggctgtagtccccccaggcccctaggtcgcgacggctcgtaagcacgacgcggtcggccgcggggctttgcgggggggcgtcctcgggcgcatgcgccattacctctcggatggccgcggcgcgctggtcggccgagctgaccaagggcgccacgaccacggcgcgctccgtctgcaggcccttccacgtgtcgtggagttcctggacaaactcggccacgggctcgggtcccgcggccgcgcgcgcggcttgatagcaggccgacagacgccgccagcgcgctagaaactgacccatgaaacaaaacccggggacctggtctcccgacagcagcttcgacgcccgggcgtgaatgccggacacgacggacagaaacccgtgaatttcgcgccggaccacggccagcacgttgtcctcgtgcgacacctgggccgccagctcgtcgcacacccccaggtgcgccgtggtttcggtgatgacggaacgcaggctcgcgagggacgcgaccagcgcgcgcttggcgtcgtgatacatgctgcagtactgactcaccgcgtcccccatggcctcggggggccagggccccaggcggtcgggcgtgtccccgaccaccgcatacaggcggcgcccgtcgctctcgaaccgacactcgaaaaaggcggagagcgtgcgcatgtgcagccgcagcagcacgatggcgtcctccagttggcgaatcagggggtcggcgcgctcggcgaggtcctgcagcaccccccgggcagccagggcgtacatgctaatcaacaggaggctggtgcccacctcggggggcggggggggctgcagttggaccaggggccgcagctgctcgacggcacccctggagatcacgtacagctcccggagcagctgctctatgttgtcggccatctgcatagtggggccgaggccgccccgggcggccggttcgaggagagtgatcagcgcgcccagtttggtgcgatggccctcgaccgtggggagatagcccagcccaaagtcccgggcccaggccaacacacgcagggcgaactcgaccgggcggggaaggtaggccgcgctacacgtggccctcagcgcgtccccaaccaccagggccagaacgtaggggacgaagcccgggtcggcgaggacgttggggtgaatgccctcgagggcggggaagcggatctgggtcgccgcggccaggtggacagagggggcatggctgggctgcccgacggggagaagcgcggacagcggcgtggccggggtggtgggggtgatgtcccagtgggtctgaccatacacgtcgatccagatgagcgccgtctcgcggagaaggctgggttgaccggaactaaagcggcgctcggccgtctcaaactcccccacgagcgcccgccgcaggctcgccagatgttccgtcggcacggccggccccatgatacgcgccagcgtctggctcagaacgccccccgacaggccgaccgcctcacagagccgcccgtgcgtgtgctcgctggcgccctggacccgcctgaaagtttttacgtagttggcatagtacccgtattcccgcgccagaccaaacacgttcgaccccgcgagggcaatgcacccaaagagctgctggacttcgccgagtccgtggccggcgggcgtccgcgcggggacgcccgccgccagaaacccctccagggccgaaaggtagtgcgtgcagtgcgagggcgtgaacccagcgtcgatcagggtgttgatcaccacggagggcgaattggtattctggatcaacgtccacgtctgctgcagcagagccagcagccgctgctgggcgccggcggagggctgctccccgagctgcagcaggctggagacggcaggctggaagactgccagtgccgacgaactcaggaacggcacgtcgggatcaaacacggccacgtccgtccgcacgcgcgccattagcgtccccgggggcgcacaggccgagcgcgggctgacgcggctgagggccgtcgacacgcgcacctcctcgcggctgcgaaccatcttgttggcctccagtggcggaatcattatggccgggtcgatctcccgcacggtgtgctgaaactgcgccaacaggggcggcgggaccacagccccccgctcgggggtcgtcaggtactcgtccaccagggccaacgtaaagagggcccgtgtgaggggagtgagggtcgcgtcgtctatgcgctggaggtgcgccgagaacagcgtcacccgattactcaccagggccaagaaccggaggccctcttgcacgaacggggcggggaagagcaggctgtacgccggggtggtaaggttcgcgctgggctgccccaacgggaccggcgccagcttgagcgacgtctccccaagggcctcgatggaggtccgcgggctcatggccaagcagctcttggtgacggtttgccagcggtctatccactccacggcgcactggcggacgcggaccggccccagggccgccgcggtgcgcaggccggcggactccagcgcatgggacgtgtcggagccggtgaccgcgaggatggtgtccttgatgacctccatctcccggaaggcctggtcgggggcctcggggagagccaccaccaagcggtgtacgagcaacccggggaggttctcggccaagagcgccgtctccggaagcccgtgggcccggtggagcgcgcacaggtgttccagcagcggccgccagcatgcccgcgcgtctgccggggcgatggccgttcccgacaacagaaacgccgccatggcggcgcgcagcttggccgtggccagaaacgccgggtcgtccgccccgtttgccgtctcggccgtgggggttggcggttggcgaaggccggctaggctcgccaataggcgctgcataggtccgtccgagggcggaccggcgggtgaggtcgtgacgacgggggcctcggacgggagaccgcggtctgccatgacgcccggctcgcgtgggtgggggacagcgtagaccaacgacgagaccgggcgggaatgactgtcgtgcgctgtagggagcggcgaattatcgatcccccgcggccctccaggaaccccgcaggcgttgcgagtaccccgcgtcttcgcggggtgttatacggccacttaagtcccggcatcccgttcgcggacccaggcccgggggattgtccggatgtgcgggcagcccggacggcgtgggttgcggactttcggcggggcggcccaaatggccctttaaacgtgtgtatacggacgcgccgggccagtcggccaacacaacccaccggaggcggtagccgcgtttggctgtggggtgggtggttccgccttgcgtgagtgtcctttcgaccccccccctcccccgggtcttgctaggtcgcgatctgtggtcgcaatgaagaccaatccgctacccgcaaccccttccgtgtggggcgggagtaccgtggaactcccccccaccacacgcgataccgcggggcagggcctgcttcggcgcgtcctgcgccccccgatctctcgccgcgacggcccagtgctccccagggggtcgggaccccggagggcggccagcacgctgtggttgcttggcctggacggcacagacgcgccccctggggcgctgacccccaacgacgataccgaacaggccctggacaagatcctgcggggcaccatgcgcgggggggcggccctgatcggctccccgcgccatcatctaacccgccaagtgatcctgacggatctgtgccaacccaacgcggatcgtgccgggacgctgcttctggcgctgcggcaccccgccgacctgcctcacctggcccaccagcgcgccccgccaggccggcagaccgagcggctgggcgaggcctggggccagctgatggaggcgaccgccctggggtcggggcgagccgagagcgggtgcacgcgcgcgggcctcgtgtcgtttaacttcctggtggcggcgtgtgccgcctcgtacgacgcgcgcgacgccgccgatgcggtacgggcccacgtcacggccaactaccgcgggacgcgggtgggggcgcgcctggatcgtttttccgagtgtctgcgcgccatggttcacacgcacgtcttcccccacgaggtcatgcggtttttcggggggctggtgtcgtgggtcacccaggacgagctagcgagcgtcaccgccgtgtgcgccgggccccaggaggcggcgcacaccggccacccgggccggccccgctcggccgtgatcctcccggcgtgtgcgttcgtggacctggacgccgagctggggctggggggcccgggcgcggcgtttctgtacctggtattcacttaccgccagcgccgggaccaggagctgtgttgtgtgtacgtgatcaagagccagctccccccgcgcgggttggagccggccctggagcggctgtttgggcgcctccggatcaccaacacgattcacggcaccgaggacatgacgcccccggccccaaaccgaaaccccgacttccccctcgcgggcctggccgccaatccccaaaccccgcgttgctctgctggccaggtcacgaacccccagttcgccgacaggctgtaccgctggcagccggacctgcgggggcgccccaccgcacgcacctgtacgtacgccgcctttgcagagctcggcatgatgcccgaggatagtccccgctgcctgcaccgcaccgagcgctttggggcggtcagcgtccccgttgtcatcctggaaggcgtggtgtggcgccccggcgagtggcgggcctgcgcgtgagcgtagcaaacgccccgcccacacaacgctccgcccccaaccccttccccgctgtcactcgttgttcgttgacccggacgtccgccaaataaagccactgaaacccgaaacgcgagtgttgtaacgtcctttgggcgggaggaagccacaaaatgcaaatgggatacatggaaggaacacacccccgtgactcaggacatcggcgtgtccttttgggtttcactgaaactggcccgcgccccacccctgcgcgatgtggataaaaagccagcgcgggtggtttagggtaccacaggtgggtgctttggaaacttgtcggtcgccgtgctcctgtgagcttgcgtccctccccggtttcctttgcgctcccgccttccggacctgctctcgcctatcttctttggctctcggtgcgattcgtcaggcagtggccttgtcgaatctcgaccccaccactcgccggacccgccgacgtcccctctcgagcccgccgaaacccgccgcgtctgttgaaatggccagccgccccgccgcatcctctcccgtcgaagcgcgggccccggttgggggacaggaggccggcggccccagcgcagccacccagggggaggccgccggggcccctctcgcccgcggccaccacgtgtactgccagcgagtcaatggcgtgatggtgctttccgacaagacgcccgggtccgcgtcctaccgcatcagcgatagcaactttgtccaatgtggttccaactgcaccatgatcatagacggagacgtggtgcgcgggcgcccccaggacccgggggccgcggcatcccccgctcccttcgttgcggtgacaaacatcggagccggcagcgacggcgggaccgccgtcgtggcattcgggggaaccccacgtcgctcggcggggacgtctaccggtacccagacgaccgacgtccccaccgaggcccttgggggcccccctcctcctccccgcttcaccctgggtggcggctgttgttcctgtcgcgacacacggcgccgctctgcggtattcgggggggagggggatcccgtcggccccgcggagttcgtctcggacgaccggtcgtccgattccgactcggatgactcggaggacaccgactcggagacgctgtcacacgcctcctcggacgtgtccggcggggccacgtacgacgacgcccttgactccgattcgtcatcggatgactccctgcagatagatggccccgtgtgtcgcccgtggagcaatgacaccgcgcccctggatgtttgccccgggacccccggcccgggcgccgacgccggtggtccctcagcggtagacccacacgcaccgacgccaggggccggcgctggtcttgcggccgatcccgccgtggcccgggacgacgcggaggggctttcggacccccggccacgtctgggaacgggcacggcctaccccgtccccctggaactcacgcccgagaacgcggaggccgtggcgcgctttctgggagatgccgtgaaccgcgaacccgcgctcatgctggagtacttttgccggtgcgcccgcgaggaaaccaagcgtgtcccccccaggacattctgcagcccccctcgcctcacggaggacgactttgggcttctcaactacgcgctcgtggagatgcagcgcctgtgtctggacgttcctccggtcctgccgaacgcatacatgccctattatctcagggagtatgtgacgcggctggtcaacgggttcaagccgctggtgagccggtccgctcgcctttaccgcatcctgggggttctggtgcacctgcggatccggacccgggaggcctcctttgaggagtggctgcgatccaaggaagtggccctggactttggcctgacggaaaggcttcgcgagcacgaagcccagctggtgatcctggcccaggctctggaccattacgactgtctgatccacagcacaccgcacacgctggtcgagcgggggctgcaatcggccctgaagtatgaggagttttacctaaagcgctttggcgggcactacatggagtccgtcttccagatgtacacccgcatcgccggctttttggcctgccgggccacgcgcggcatgcgccacatcgccctggggcgagaggggtcgtggtgggaaatgttcaagttctttttccaccgcctctacgaccaccagatcgtaccgtcgacccccgccatgctgaacctggggacccgcaactactacacctccagctgctacctggtaaacccccaggccaccacaaacaaggcgaccctgcgggccatcaccagcaacgtcagcgccatcctcgcccgcaacgggggcatcgggctatgcgtgcaggcgtttaacgactccggccccgggaccgctagcgtcatacccgccctcaaggtcctcgactcgctggtggcggcgcacaacaaagagagcgcgcgtccaaccggcgcgtgcgtgtacctggagccgtggcacaccgacgtgcgggccgtgctccggatgaagggggtcctcgccggcgaagaggcccagcgctgcgacaatatcttcagcgccctctggatgccagacctgtttttcaagcgcctgattcgccacctggacggcgagaagaacgtcacatggaccctgttcgaccgggacaccagcatgtcgctcgccgactttcacggggaggagttcgagaagctctaccagcacctcgaggtcatggggttcggcgagcagatacccatccaggagctggcctatggcattgtgcgcagtgcggccacgaccgggagccccttcgtcatgttcaaagacgcggtgaaccgccactacatctacgacacccagggggcggccatcgccggctccaacctctgcaccgagatcgtccatccggcctccaagcgatccagtggggtctgcaatctgggaagcgtgaatctggcccgatgcgtctccaggcagacgtttgactttgggcggctccgcgacgccgtgcaggcgtgcgtgctgatggtgaacatcatgatcgacagcacgctacaacccacgccccagtgcacccgcggcaacgacaacctgcggtccatgggaatcggcatgcagggcctgcacacggcctgcctgaagctggggctggatctggagtctgtcgaatttcaggacctgaacaaacacatcgccgaggtgatgctgctgtcggcgatgaagaccagcaacgcgctgtgcgttcgcggggcccgtcccttcaaccactttaagcgcagcatgtatcgcgccggccgctttcactgggagcgctttccggacgcccggccgcggtacgagggcgagtgggagatgctacgccagagcatgatgaaacacggcctgcgcaacagccagtttgtcgcgctgatgcccaccgccgcctcggcgcagatctcggacgtcagcgagggctttgcccccctgttcaccaacctgttcagcaaggtgacccgggacggcgagacgctgcgccccaacacgctcctgctaaaggaactggaacgcacgtttagcgggaagcgcctcctggaggtgatggacagtctcgacgccaagcagtggtccgtggcgcaggcgctcccgtgcctggagcccacccaccccctccggcgattcaagaccgcgtttgactacgaccagaagttgctgatcgacctgtgtgcggaccgcgccccctacgtcgaccatagccaatccatgaccctgtatgtcacggagaaggcggacgggaccctcccagcctccaccctggtccgccttctggtccacgcatataagcgcggactaaaaacagggatgtactactgcaaggttcgcaaggcgaccaacagcggggtctttggcggcgacgacaacattgtctgcacgagctgcgcgctgtgaccgacaaaccccctccgcgccaggcccgccgccactgtcgtcgccgtcccacgcgctcccccgctgccatggattccgcggccccagccctctcccccgctctgacggcccatacgggccagagcgcgccggcggacctggcgatccagattccaaagtgccccgaccccgagaggtacttctacacctcccagtgtcccgacattaaccacctgcgctccctcagcatccttaaccgctggctggaaaccgagcttgttttcgtgggggacgaggaggacgtctccaagctttccgagggcgagctcagcttttaccgcttcctcttcgctttcctgtcggccgccgacgacctggttacggaaaacctgggcggcctctccggcctgtttgagcagaaggacattctccactactacgtggagcaggaatgcatcgaagtcgtacactcgcgcgtgtacaacatcatccagctggtgctttttcacaacaacgaccaggcgcgccgcgagtacgtggccggcaccatcaaccacccggccatccgcgccaaggtggactggctggaagcgcgggtgcgggaatgcgcctccgttccggaaaagttcatcctcatgatcctcatcgagggcatcttttttgccgcctcgtttgccgccatcgcctaccttcgcaccaacaaccttctgcgggtcacctgccagtcaaacgacctcatcagccgggacgaggccgtgcacacgacggcctcgtgttacatctacaacaactacctcggcgggcacgccaagcccccgcccgaccgcgtgtacgggctgttccgccaggcggtcgagatcgagatcggatttatccgatcccaggcgccgacggacagccatatcctgagcccggcggcgctggcggccatcgaaaactacgtgcgattcagcgcggatcgcctgttgggccttatccacatgaagccactgttttccgccccaccccccgacgccagctttccgctgagcctcatgtccaccgacaaacacaccaattttttcgagtgtcgcagcacctcctacgccggggcggtcgtcaacgatctgtgagggtcgcggcgcgcttctacccgtgtttgcccataataaacctctgaaccaaactttgggtctcattgtgattcttgtcagggacgcgggggtgggagaggataaaaggcggcgcaaaaagcagtaaccaggtccgtccagattctgagggcataggataccataattttattggtgggtcgtttgttcggggacaagcgcgctcgtctgacgtttgggctactcgtcccagaatttggccaggacgtccttgtagaacgcgggtgggggggcctgggtccgcagctgctccagaaacctgtcggcgatatcaggggccgtgatatgccgggtcacaatagatcgcgccaggttttcgtcgcggatgtcctggtagataggcaggcgtttcagaagagtccacggcccccgctccttggggccgataagcgatatgacgtacttaatgtagcggtgttccaccagctcggtgatggtcatgggatcggggagccagtccagggactctggggcgtcgtggatgacgtggcgtcgccggctggccacataactgcggtgctcttccagcagctgcgcgttcgggacctggacgagctcgggcggggtgagtatctccgaggaggacgacctggggccggggtggcccccggtaacgtcccggggatccagggggaggtcctcgtcgtcttcgtatccgccggcgatctgttgggttagaatttcggtccacgagacgcgcatctcggtgccgccggcggccggcggcaaagggggcctggtttccgtggagcgcgagctggtgtgttcccggcggatggcccgccgggtctgagagcgactcgggggggtccagtgacattcgcgcagcacatcctccacggaggcgtaggtgttattgggatggaggtcggtgtggcagcggacaaagagggccaggaactgggggtagctcatcttaaagtactttagtatatcgcgacagttgatcgtgggaatgtagcaggcgctaatatccaacacaatatcacagcccatcaacaggaggtcagtgtctgtggtgtacacgtacgcgaccgtgttggtgtgatagaggttggcgcaggcatcgtccgcctccagctgacccgagttaatgtaggcgtaccccagggcccggagaacgcgaatacagaacagatgcgccagacgcagggccggcttcgagggcgcggcggacggcagcgcggctccggacccggccgtcccccgggtccccgaggccagagaggtgccgcgccggcgcatgttggaaaaggcagagctgggtctggagtcggtgatgggggaaggcggtggagaggcgtccacgtcactggcctcctcgtccgtccggcattgggccgtcgtgcgggccaggatggccttggctccaaacacaaccggctccatacaattgaccccgcgatcggtaacgaagatggggaaaagggacttttgggtaaacacctttaataagcgacagaggcagtgtagcgtaatggcctcgcggtcgtaactggggtatcggcgctgatatttgaccaccaacgtgtacatgacgttccacaggtccacggcgatgggggtgaagtacccggccggggccccaaggccctggcgcttgaccagatggtgtgtgtgggcaaacttcatcatcccgaacaaacccatgtcaggtcgattgtaactgcggatcggcctaactaaggcgtggttggtgcgacggtccgggacacccgagcctgtctctctgtgtatggtgacccagacaacaacaccgacacaagaggacaataatccgttaggggacgctctttataatttcgatggcccaactccacgcggattggtgcagcaccctgcatgcgccggtgtgggccaaacttccccccgctcattgcctcttccaaaagggtgtggcctaacgagctgggggcgtatttaatcaggctagcgcggcgggcctgccgtagtttctggctcggtgagcgacggtccggttgcttgggtcccctggctgccagcaaaaccccaccctcgcagcggcatacgccccctccgcgtcccgcacccgagaccccggcccggctgccctcaccaccgaagcccacctcgtcactgtggggtgttcccagcccgcattgggatgacggattcccctggcggtgtggcccccgcctcccccgtggaggacgcgtcggacgcgtccctcgggcagccggaggagggggcgccctgccaggtggtcctgcagggcgccgaacttaatggaatcctacaggcgtttgccccgctgcgcacgagccttctggactcgcttctggttatgggcgaccggggcatccttatccataacacgatctttggggagcaggtgttcctgcccctggaacactcgcaattcagtcggtatcgctggcgcggacccacggcggcgttcctgtctctcgtggaccagaagcgctccctcctgagcgtgtttcgcgccaaccagtacccggacctacgtcgggtggagttggcgatcacgggccaggccccgtttcgcacgctggttcagcgcatatggacgacgacgtccgacggcgaggccgttgagctagccagcgagacgctgatgaagcgcgaactgacgagctttgtggtgctggttccccagggaacccccgacgttcagttgcgcctgacgaggccgcagctcaccaaggtccttaacgcgaccggggccgatagtgccacgcccaccacgttcgagctcggggttaacggcaaattttccgtgttcaccacgagtacctgcgtcacatttgctgcccgcgaggagggcgtgtcgtccagcaccagcacccaggtccagatcctgtccaacgcgctcaccaaggcgggccaggcggccgccaacgccaagacggtgtacggggaaaatacccatcgcaccttctctgtggtcgtcgacgattgcagcatgcgggcggtgctccggcgactgcaggtcgccgggggcaccctcaagttcttcctcacgacccccgtccccagtctgtgcgtcaccgccaccggtcccaacgcggtatcggcggtatttctcctgaaaccccagaagatttgcctggactggctgggtcatagccaggggtctccttcagccgggagctcggcctcccgggcctctgggagcgagccaacagacagccaggactccgcgtcggacgcggtcagccacggcgatccggaagacctcgatggcgctgcccgggcgggagaggcgggggcctcgcacgcctgtccgatgccgtcgtcgaccacgcgggtcactcccacgaccaagcgggggcgctcggggggcgaggatgcgcgcgcggacacggccctaaagaaacctaagacggggtcgcccaccgcacccccgcccacagatccagtccccctggacacggaggacgactccgatgcggcggacgggacggcggcccgtcccgccgctccagacgcccggagcggaagccgttacgcgtgttactttcgcgacctcccgaccggagaagcaagccccggcgccttctccgccttccgggggggcccccaaaccccgtatggttttggattcccctgacggggcggggccttggcggccgcccaactctcgcaccatcccgggttaatgtaaataaacttggtattgcccaacactctcccgcgtgtcgcgtgtggttcatgtgtgtgcctggcgtcccccaccctcgggttcgtgtatttcctttccctgtccttataaaagccgtatgtggggcgctgacggaaccaccccgcgtgccatcacggccaaggcgcgggatgctccgcaacgacagccaccgggccgcgtccccggaggacggccagggacgggtcgacgacggacggccacacctcgcgtgcgtgggggccctggcgcgggggttcatgcatatctggcttcaggccgccacgctgggttttgcgggatcggtcgttatgtcgcgcgggccgtacgcgaatgccgcgtctggggcgttcgccgtcgggtgcgccgtgctgggctttatgcgcgcaccccctcccctcgcgcggcccaccgcgcggatatacgcctggctcaaactggcggccggtggagcggcccttgttctgtggagtctcggggagcccggaacgcagccgggggccccgggcccggccacccagtgcctggcgctgggcgccgcctatgcggcgctcctggtgctcgccgatgacgtctatccgctctttctcctcgccccggggcccctgttcgtcggcaccctggggatggtcgtcggcgggctgacgatcggaggcagcgcgcgctactggtggatcggtgggcccgccgcggccgccttggccgcggcggtgttggcgggcccgggggcgaccaccgccagggactgcttctccagggcgtgccccgaccaccgccgcgtctgcgtcatcgtcgcaggcgagtctgtttcccgccgccccccggaggacccagagcgacccggggaccccgggccaccgtcccccccgacaccccaacgatcccaggggccgccggccgatgaggtcgcaccggccggggtagcgcggcccgaaaacgtctgggtgcccgtggtcacctttctgggggcgggcgcgctcgccgtcaagacggtgcgagaacatgcccgggaaacgccgggcccgggcctgccgctgtggccccaggtgtttctcggaggccatgtggcggtggccctgacggagctgtgtcaggcgcttatgccctgggaccttacggacccgctgctgtttgttcacgccggactgcaggtcatcaacctcgggttggtgtttcggttttccgaggttgtcgtgtatgcggcgctagggggtgccgtgtggatttcgttggcgcaggtgctggggctccggcgtcgcctgcacaggaaggaccccggggacggggccaggttggcggcgacgcttcggggcctcttcttctccgtgtacgcgctggggtttggggtgggggcgctgctgtgccctccggggtcaacgggcgggtggtcgggcgattgatatatttttcaataaaaggcattagtcccgaagaccgccggtgtgtgatgatttcgccataacacccaaaccccggatggggcccgggtataaattccggaaggggacacgggctaccctcactaccgagggcgcttggtcgggaggccgcatcgaacgcacacccccatccggtggtccgtgtggaggtcgtttttcagtgcccggtctcgctttgccgggaacgctagccgatccctcgcgagggggaggcgtcgggcatggccccggggcgggtgggccttgccgtggtcctgtggagcctgttgtggctcggggcgggggtggccgggggctcggaaactgcctccaccgggcccacgatcaccgcgggagcggtgacgaacgcgagcgaggcccccacatcggggtcccccgggtcagccgccagcccggaagtcacccccacatcgaccccaaaccccaacaatgtcacacaaaacaaaaccacccccaccgagccggccagccccccaacaacccccaagcccacctccacgcccaaaagcccccccacgtccacccccgaccccaaacccaagaacaacaccacccccgccaagtcgggccgccccactaaaccccccgggcccgtgtggtgcgaccgccgcgacccattggcccggtacggctcgcgggtgcagatccgatgccggtttcggaattccacccgcatggagttccgcctccagatatggcgttactccatgggtccgtcccccccaatcgctccggctcccgacctagaggaggtcctgacgaacatcaccgccccacccgggggactcctggtgtacgacagcgcccccaacctgacggacccccacgtgctctgggcggagggggccggcccgggcgccgaccctccgttgtattctgtcaccgggccgctgccgacccagcggctgattatcggcgaggtgacgcccgcgacccagggaatgtattacttggcctggggccggatggacagcccgcacgagtacgggacgtgggtgcgcgtccgcatgttccgccccccgtctctgaccctccagccccacgcggtgatggagggtcagccgttcaaggcgacgtgcacggccgccgcctactacccgcgtaaccccgtggagtttgtctggttcgaggacgaccgccaggtgtttaacccgggccagatcgacacgcagacgcacgagcaccccgacgggttcaccacagtctctaccgtgacctccgaggctgtcggcggccaggtccccccgcggaccttcacctgccagatgacgtggcaccgcgactccgtgatgttctcgcgacgcaatgccaccgggctggccctggtgctgccgcggccaaccatcaccatggaatttggggtccggcatgtggtctgcacggccggctgcgtccccgagggcgtgacgtttgcctggttcctgggggacgacccctcaccggcggctaagtcggccgttacggcccaggagtcgtgcgaccaccccgggctggctacggtccggtccaccctgcccatttcgtacgactacagcgagtacatctgtcggttgaccggatatccggccgggattcccgttctagagcaccacggcagtcaccagcccccacccagggaccccaccgagcggcaggtgatcgaggcgatcgagtgggtggggattggaatcggggttctcgcggcgggggtcctggtcgtaacggcaatcgtgtacgtcgtccgcacatcacagtcgcggcagcgtcatcggcggtaacgcgagacccccccgttacctttttaatatctatatagtttggtccccctctatcccgcccaccgctgggcgctataaagccgccaccctctcttccctcaggtcatccttggtcgatcccgaacgacacacggcgtggagcaaaacgcctccccctgagccgctttcctaccaacacaacggcatgcctctgcgggcatcggaacacgcctaccggcccctgggccccgggacaccccccatgcgggctcggctccccgccgcggcctgggttggcgtcgggaccatcatcgggggagttgtgatcattgccgcgttggtcctcgtgccctcgcgggcctcgtgggcactttccccatgcgacagcggatggcacgagttcaacctcgggtgcatatcctgggatccgacccccatggagcacgagcaggcggtcggcggctgtagcgccccggcgaccctgatcccccgcgcggctgccaaacagctggccgccgtcgcacgcgtccagtcggcaagatcctcgggctactggtgggtgagcggagacggcattcgggcctgcctgcggctcgtcgacggcgtcggcggtattgaccagttttgcgaggagcccgcccttcgcatatgctactatccccgcagtcccgggggctttgttcagtttgtaacttcgacccgcaacgcgctggggctgccgtgaggcgcgtgtactgcggtctgtctcgtctcctcttctccccttccctccccctccgcatcccaggatcacaccggccaacgagggttgggggggtccggcacggacccaaaataataaacacacaatcacgtgcgataaaaagaacacgcggtcccctgtggtgtttttggttatttttattaaatctcgtcgacaaacagggggaaaggggcgtggtctagcgacggcagcacgggcggaggcgttcaccggctccggcgtccttcgcgtttaagcttggtcaggagggcgctcagggcggcgacgttggtcgggccgtcgttggtcagggcgttggctcgatggcgggcgaggacgggcgaggggctcaacggcgggggcgggggtccggtgcggcccgggggggaaaatagggcggatcccccccagtcgtacaggggattttccgcctcaatgtacggggaggccggcgctgcattcgccgtgttcacgcagacgttttcgtagacccgcatccatggtatttcctcgtagacacgccccccgtcctcgctcacggtctcgtatattgactcgtcgtcctcgtagggggcgtgccgttcgcgggccgaggcggcgtgggtggctttgcggcgggcgtcgtcgtcgtcgtcgtcggccgtcagatacgtggcttccatctggtcgggttctccctccggggcgggtccccacacccgtggccgatcgaggctccccagagacgcgcgccggacaagaagggggcacgtcgccgccggcggtcgcctgtcgggtcccgcgacgttacgggccgggaggcgcgggggcacctcccccatgtgcgtgtaatacgtggccggctgtgcggccgcagcggggggctcggcgaccgggtcgtccgcatccggaagcgggggccccgcgccgtccgcacggcgcctccggaaccgccgggtggacggcgcgggggtcgagtgtaggcgaggtcgggggaggggcgggggctcgttgtcgcgccgcgcccgctgaatcttttcccgacaggtcccaccccccgcgcgatgcccccccgggccgcgggccatgtcgtccgggggaggccccgcggaccacgtcgtccggcgagacgccacgagccgcaggatggactcgtagtggagcgacggcgccccgctgcggagcagatccgcggccagggcggccccgaaccaagccttgatgctcaactccatccgggcccagctgggggcggtcatcgtggggaacaggggggcggtggtccgacagaaacgctcctggctgtccaccgcggcccgcagatactcgttgttcaggctgtcggtggcccagacgccgtacccggtgagggtcgcgttgatgatatactgggcgtggtgatggacgatcgacagaacctccaccgtggataccacggtatccacggtcccgtacgtaccgccgctccgcttgccggtctgccacaggttggctaggcacgtcaggtggcccaggacgtcgctgaccgccgccctgagcgccatgcactgcatggagccggtcgtgccgctgggaccccggtccagatggcgcgcgaacgtttccgcgggcgcctccgggctgccgccgagcgggaggaaccggcgattggagggactcagccggtgacatacgtgcttgtccgtcgtccacagcatccaggacgcccaccggtacagcacggagacgtaggccaggagctcgttgagccgcagtgcggtgtcggtgctggggcggcttgggtccgccgggcgcataaagaacatgtactgctgaatccgatggagggcgtcgcgcaggccggccacggtggcggcgtacttggccgccgcggccccgctcttgaacggggtgcgcgccagcagctttggcgccagggtgggccgcagcagcacgtgaaggctggggtcgcagtcgcccacggggtcctcggggacgtccaggccgctgggcaccaccgtctgcaggtacttccagtactgcgtgaggatggcgcggctcaactggccgccgggcagctccacctcgcccagcgcctgggtggcggccgaagcgtagtgccggatgtactcgtagtgcgggtcgctggcgagcccgtccacgatcaaactctcgggaaccgtgttgtgttgccgcgcggccaaccggacgctgcgatcggtgcaggtcagaaacgccggctgcgcgtcgtcggagcgctgccgcaaggcgcccacggccgcgctaaggagcccctccggggtggggagcagacacccgccgaagatgcgccgctcgggaacgcccgcgttgtcgccgcggatcaggttggcaggcgtcaggcaccgcgccagccgcagggagctcgcgccgcgcgtccggcgctgcatggtgacgcccgttcggtcgggacccgccggtcggagttatgccgcgtccagggccatcggggcgctttttatcgggaggagcttatgggcgtggcgggcctcccagcccggtcgcgcgcctccccgacacgtgcgcccgcagggcggcggccccctcgtctcccatcagcagtttcctaaactgggacatgatgtccaccacgcggacccgcgggcccaacacggacccgccgcttacgggggcgggggggaagggctccaggtccttgagcagaaaggcggggtctgccgtcccggacacgggggcccggggcgcggaggaggcggggcgcagatccacgtgctccgcggccgcgcggacgtccgcccagaacttggcgggggtggtgcgcgcgtacaggggctgggtcgctcggaggacacacgcgtagcgcaggggggtgtacgtgcccacctcgggggccgtgaatcccccgtcaaacgcggccagtgtcacgcacgccaccacggtgtcggcaaagcccagcagccgctgcaggacgagcccggcggccagaatggcgcgcgtggtcgcagcgtcgtcccggcgccggtgcgcgtccccgcacgcccgggcgtactttaaggtcactgtcgccagggccgtgtgcagcgcgtacaccgcagcgcccagcacggcgttgagcccgctgttggcgagcagccggcgcgctgcggtgtcgcccagcgcctcgtgctcggcccccacgaccgcggggcttcccaggggcagggcgcgaaacagctcctcccgcgccacgtccgcaaaggcggggtggtgcacgtgcgggtgcaggcgcgcccccacgaccaccgagagccactggaccgtctgctccgccatcaccgccaacacatccagcacgcgccccaggaaggcggcctcccgcgtcaaaacgcaccggacggcgtcgggattgaagcgggcgagcagggccccggtggccaggtacgtcatgcggccggcatagcgggcggccacgcgacagtcgcggtccagcagcgcgcgcaccccgggccagtacagcagggaccccagcgagctgcgaaacaccgcggcgtcggggccggattggggggacactaacccccccgcgctcagtaacggcacggccgcggccccgacgggacgcaacgccgtgaggctcgcgaactgccgcctcagctcggcagccctgtcgtccaggtccgacccgcgcgcctctgcgtgaaggcgcgtcccgcacacccacccgttgatggccagccgcacgacggcatccgccaaaaagctcatcgcctgggcggggctggtttttgttcgacgatccgtcaggtcaagaatcccatcgcccgtgatataccaggccaacgcctcgccctgctgcagggtttggcggaaaaacaccgcggggttgtcgggggaggcgaagtgcatgacccccacgcgcgataacccgaacgcgctatccggacacgggtaaaacccggccggatgccccagggctagggcggagcgcacggactcgtcccacacggcaacctgaggggccagtcgatccaacgggaatgccgcccggagctccgggcccggcacgcgtccctccagaacctccaccttgggcggggaacgggccccgccgccgtcctccggcccgacgtcttccgggtagtcgtcctcctcgtactgcagttcctctaggaacagcggcgacggcgccacccgcgaaccgccgacccgccccaaaatagcccgcgcgtcgacgggacccaggtatcccccctgccgggcctgcggaggaccgcggggaacctcatcatcatcgtccaggcgaccgcgcaccgactggctacgggccgcatcgggcccggggcgctgccgggacgctcggcgatgggatgagggcggggcttccgacgcgcgccgtcgtcgggctcgcgggccttcccgtcgacggcgcacgggcggctcgtcgcccgccatctcctccagagcctctagctcgctgtcgtcatccccgcggaacaccgcacgcaggtaccccatgaaccccaccccatcgcccgctggctcgtccgccacgggcgaggcgcgggggcgggtggatgcgcgcctcctgcgccccgcgggttcgcgagccgacatggtggcgatagacgcgggttatcggatgtccgctaccccccaaaaaagaaaaagaccccacagcgcggatggaggtcggggtaggtgccgccggaccccctcgcgatgggaatggacgggagcgacggggccggcgcaaaaaacgcagtatctcccgcgaaggctacccgccgccccagcccccggccaaatgcggaaacggtcccgcgctctcgcctttatacgcgggccgccctgcgacacaatcacccgtccgtggtttcgaatctacacgacaggcccgcagacgcggctaacacacacgccggcaacccagaccccagtgggttggttgcgcggtcccgtctcctggctagttctttcccccaccaccaaataatcagacgacaaccgcaggtttttgtaatgtatgtgctcgtgtttattgtggatacgaaccggggacgggaggggaaaacccagacgggggatgcgggtccggtcgcgccccctatgggtggggttgatacgggaaagacgatatcgggcttttgatgcgatcgtccccgcccgcccagagagtgtgggacgcccgacggcgcgggaagagaaaaacccccaaacgcgttagaggaccggacggaccttatggggggaagtgggcagcgggaaccccgtccgttcccgaggaatgacagcccgtggtcgccaccccgcatttaagcaacccgcacgggccgccccgtacctcgtgacttccccccacattggctcctgtcacgtgaaggcaaaccgagggcggctgtccaacccaccccccgccacccagtcacggtccccgtcggattgggaaacaaaggcacgcaacgccaacaccgaatgaacccctgttggtgctttattgtctgggtacggaagtttttcactcgacgggccgtctggggcgagaagcggagcgggctggggctcgaggtcgctcggtggggcgcgacgccgcagaacgccctcgagtcgccgtggccgcgtcgacgtcctgcaccacgtctggattcaccaactcgttggcgcgctgaatcaggtttttgccctcgcagaccgtcacgcggatggtggtgatgccaaggagttcgttgaggtcttcgtctgtgcgcggacgcgacatgtcccagagctggaccgccgccatccgggcatgcatggccgccaggcgcccaaccgcggcgcagaagacgcgcttgttaaagccggccacccggggggtccatggcgcgtcggggtttgggggggcggtgctaaagtgcagctttctggccagcccctgcgcgggtgtcttggatcgggttggcgccgtcgacgcgggggcgtctgggagtgcggcggattctggctgggccgatttcctgccgcgggtggtctccgccgccggggccgcgggggccttagtcgccacccgctgggttcggggggcccggggggcggtggtgggtgtgcgtccggcccctccggacccagcgggcggcggaggcgcccgcgcaggccccggggcggacaaaaccgccccggaaacgggacgccgcgtccgggggacctccgggtgttcgtcgtcttcggatgacgagcccccgtagagggcataatccgactcgtcgtactggacgaaacggacctcgccccttgggcgcgcgcgtgtctgtagggcgccacggcgggaggtgtcaggcggactatcgggactcgccatacatgaagacggggtgtagtacagatcctcgtactcatcgcgcggaacctcccgcggacccgacttcacggagcggcgagaggtcatggttccacgaacacgctagggtcggatgcgcggacaattaggcctgggttcggacggcgggggtggtgcaggtgtggagaggtcgagcgataggggcggcccgggagagaagagagggtccgcaaaacccactggggatgcgtgagtggccctctgtgggcggtgggggagagtcttataggaagtgcatataaccacaacccatgggtctaaccaatccccaggggccaagaaacagacacgccccaaacggtctcggtttccgcgaggaaggggaagtcctgggacaccctccacccccacccctcaccccacacagggcgggttcaggcgtgcccggcagccagtagcctctggcagatctgacagacgtgtgcgataatacacacgcccatcgaggccatgcctacataaaagggcaccagggcccccggggcagacatttggccagcgttttgggtctcgcaccgcgcgcccccgatcccatcgcgcccgccctcctcgccgggcggctccccgtgcgggcccgcgtctcccgccgctaaggcgacgagcaagacaaacaacaggcccgcccgacagacccttctgggggggcccatcgtccctaacaggaagatgagtcagtggggatccggggcgatccttgtccagccggacagcttgggtcgggggtacgatggcgactggcacacggccgtcgctactcgcgggggcggagtcgtgcaactgaacctggtcaacaggcgcgcggtggcttttatgccgaaggtcagcggggactccggatgggccgtcgggcgcgtctctctggacctgcgaatggctatgccggctgacttttgtgcgattattcacgcccccgcgctatccagcccagggcaccacgtaatactgggtcttatcgactcggggtaccgcggaaccgttatggccgtggtcgtagcgcctaaaaggacgcgggaatttgcccccgggaccctgcgggtcgacgtgacgttcctggacatcctggcgacccccccggccctcaccgagccgatttccctgcggcagttcccgcaactggcgcccccccctccaaccggggccgggatacgcgcagatccttggttggagggggcgctcggggacccaagcgtgactcctgccctaccggcgcgacgccgagggcggtccctcgtctatgccggcgagctgacgccggttcagacggaacacggggacggcgtacgagaagccatcgccttccttccaaaacgcgaggaggatgccggtttcgacattgtcgtccgtcgcccggtcaccgtcccggcaaacggcaccacggtcgtgcagccatccctccgcatgctccacgcggacgccgggcccgcggcctgctatgtgctggggcggtcgtcgctcaacgcccgcggcctcctggtcgttcctacgcgctggctccccgggcacgtatgtgcgtttgttgtttacaaccttacgggggttcctgtgaccctcgaggccggcgccaaggtcgcccagctcctggttgcgggggcggacgctcttccttggatccccccggacaactttcacgggaccaaagcgcttcgaaactaccccaggggtgttccggactcaaccgccgaacccaggaacccgccgctcctggtgtttacgaacgagtttgacgcggaggcccccccgagcgagcgcgggaccgggggttttggctctaccggtatttagcccatagcttggggttcgttccgggcaataaaaaacgtttgtatctcatctttcctgtgtgtagttgtttctgttggatgcctgtgggtctatcacacccgcccctccatcccacaaacacagaacacacgggttggatgaaaacacgcatttattgacccaaaacacacggagctgctcgagatgggccagggcgaggtgcggttggggaggctgtaggtctgggaacggacacgcggggacacgattccggtttggggtccgggagggcgtcgccgtttcgggcggcaggcgccagcgtaacctccgggggcggcgtgtgggggtgccccaaggagggcgcctcggtcaccccaagcccccccgagcgggttcccccggcaaccccgaaggcggagaggccaagggcccgttcggcgatggccacatcctccatgaccacgtcgctctcggccatgctccgaatagcctgggagacgagcacatccgcggacttgtcagccgcccccacggacatgtacatctgcaggatggtggccatacacgtgtccgccaggcgccgcatcttgtcctgatgggccgccacggccccgtcgatcgtgggggcctcgagcccggggtggtggcgcgccagtcgttctaggttcaccatgcaggcgtggtacgtgcgggccaaggcgcgggccttcacgaggcgtcgggtgtcgtccagggaccccagggcgtcatcgagcgtgatgggggcgggaagtagcgcgttaacgaccaccagggcctcctgcagccgcggctccgcctccgagggcggaacggccgcgcggatcatctcatattgttcctcggggcgcgctccccagccacatatagccccgagaagagaagccatcgcgggcgggtactggcccttgggcgcgcggacgcaatggggcaggaagacgggaaccgcggggagaggcgggcggccgggactcccgtggaggtgaccgcgctttatgcgaccgacgggtgcgttattacctcttcgatcgccctcctcacaaactctctactgggggccgagccggtttatatattcagctacgacgcatacacgcacgatggccgtgccgacgggcccacggagcaagacaggttcgaagagagtcgggcgctctaccaagcgtcgggcgggctaaatggcgactccttccgagtaaccttttgtttattggggacggaagtgggtgggacccaccaggcccgcgggcgaacccgacccatgttcgtctgtcgcttcgagcgagcggacgacgtcgccgcgctacaggacgccctggcgcacgggaccccgctacaaccggaccacatcgccgccaccctggacgcggaggccacgttcgcgctgcatgcgaacatgatcctggctctcaccgtggccgtcaacaacgccagcccccgcaccggacgcgacgccgccgcggcgcagtatgatcagggcgcgtccctacgctcgctcgtggggcgcacgtccctgggacaacgcggccttaccacgctatacgtccaccacgaggcgcgcgtgctggccgcgtaccgcagggcgtattatggaagcgcgcagagtcccttctggtttcttagcaaattcgggcctgacgaaaaaagcctggtgctcaccactcggtactacctgcttcaggcccagcgtctggggggcgcgggggccacgtacgacctgcaggccatcaaggacatctgcgccacctacgcgattccccacgccccccgccccgacaccgtcagcgccgcgtccctgacctcgtttgccgccatcacgcggttctgttgcacgagccagtacgcccgcggggccgcggcggccgggtttccgctttacgtggagcgccgtattgcggccgacgtccgcgagaccagtgcgctggagaagttcataacccacgatcgcagttgcctgcgcgtgtccgaccgtgaattcattacgtacatttacctggcccattttgagtgtttcagccccccgcgcctagccacgcatcttcgggccgtgacgacccaggaccccaaccccgcggccaacacggagcagccctcgcccctgggcagggaggccgtggaacaatttttttgccacgtgcgcgcccaactgaatatcggggagtacgtcaaacacaacgtgaccccccgggagaccgtcctggatggcgatacggccaaggcctacctgcgcgctcgcacgtacgcgcccggggccctgacgcccgcccccgcgtattgcggggccgtggactccgccaccaaaatgatggggcgtttggcggacgccgaaaagctcctggtcccccgcgggtggcccgcgtttgcgcccgccagtcccggggaggatacggcgggcggcacgccgcccccacagacctgcggaatcgtcaagcgcctcctgagactggccgccacggaacaacaggacaccacgcccccggcgatcgcggcgcttatccgtaatgcggcggtgcagactcccctgcccgtctaccggatatccatggtccccacgggacaggcatttgccgcgctggcctgggacgactgggcccgcataacgcgggacgctcgcctggccgaagcggtcgtgtccgccgaagcggcggcgcaccccgaccacggcgcgctgggcaggcggctcacggatcgcatccgcgcccagggccccgtgatgccccctggcggcctggatgccggggggcagatgtacgtgaatcgcaacgagatatttaacggcgcgctggcaatcacaaacatcatcctggatctcgacatcgccctgaaggagcccgtcccctttcgccggctccacgaggccctgggccactttaggcgcggggctctggcggcggttcagctcctgtttcccgcggcccgcgtggaccccgacgcatatccctgttattttttcaaaagcgcatgtcggcccggcccggcgtccgtgggttccggcagcggactcggcaacgacgacgacggggactggtttccctgctacgacgacgccggtgatgaggagtgggcggaggacccgggcgccatggacacatcccacgatcccccggacgacgaggttgcctactttgacctgtgccacgaagtcggccccacggcggaacctcgcgaaacggattcgcccgtgtgttcctgcaccgacaagatcggactgcgggtgtgcatgcccgtccccgccccgtacgtcgtccacggttctctaacgatgcggggggtggcacgggtcatccagcaggcggtgctgttggaccgagattttgtggaggccatcgggagctacgtaaaaaacttcctgttgatcgatacgggggtgtacgcccacggccacagcctgcgtttgccgtattttgccaaaatcgcccccgacgggcctgcgtgcggaaggctgctgccagtgtttgtgatcccccccgcctgcaaagacgttccggcgtttgtcgccgcgcacgccgacccgcggcgcttccattttcacgccccgcccacctatctcgcttccccccgggagatccgtgtcctgcacagcctgggtggggactatgtgagcttctttgaaaggaaggcgtcccgcaacgcgctggaacactttgggcgacgcgagaccctgacggaggtcctgggtcggtacaacgtacagccggatgcgggggggaccgtcgaggggttcgcatcggaactgctggggcggatagtcgcgtgcatcgaaacccactttcccgaacacgccggcgaatatcaggccgtatccgtccggcgggccgtcagtaaggacgactgggtcctcctacagctagtccccgttcgcggtaccctgcagcaaagcctgtcgtgtctgcgctttaagcacggccgggcgagtcgcgccacggcgcggacattcgtcgcgctgagcgtcggggccaacaaccgcctgtgcgtgtccttgtgtcagcagtgctttgccgccaaatgcgacagcaaccgcctgcacacgctgtttaccattgacgccggcacgccatgctcgccgtccgttccctgcagcacctctcaaccgtcgtcttgataacggcgtacggcctcgtgctcgtgtggtacaccgtcttcggtgccagtccgctgcaccgatgtatttacgcggtacgccccaccggcaccaacaacgacaccgccctcgtgtggatgaaaatgaaccagaccctattgtttctgggggccccgacgcacccccccaacgggggctggcgcaaccacgcccatatctgctacgccaatcttatcgcgggtagggtcgtgcccttccaggtcccacccgacgccacgaatcgtcggatcatgaacgtccacgaggcagttaactgtctggagaccctatggtacacacgggtgcgtctggtggtcgtagggtggttcctgtatctggcgttcgtcgccctccaccaacgccgatgtatgtttggtgtcgtgagtcccgcccacaagatggtggccccggccacctacctcttgaactacgcaggccgcatcgtatcgagcgtgttcctgcagtacccctacacgaaaattacccgcctgctctgcgagctgtcggtccagcggcaaaacctggttcagttgtttgagacggacccggtcaccttcttgtaccaccgccccgccatcggggtcatcgtaggctgcgagttgatgctacgctttgtggccgtgggtctcatcgtcggcaccgctttcatatcccggggggcatgtgcgatcacataccccctgtttctgaccatcaccacctggtgttttgtctccaccatcggcctgacagagctgtattgtattctgcggcggggcccggcccccaagaacgcagacaaggccgccgccccggggcgatccaaggggctgtcgggcgtctgcgggcgctgttgttccatcatcctgtcgggcatcgcaatgcgattgtgttatatcgccgtggtggccggggtggtgctcgtggcgcttcactacgagcaggagatccagaggcgcctgtttgatgtatgacgtcacatccaggccggcggaaaccggaacggcatatgcaaactggaaactgtcctgtcttggggcccacccacccgacgcgtcatatgtaaatgaaaatcgttcccccgaggccatgtgtagcctggatcccaacgaccccgcccatgggtcccaattggccgtcccgttaccaagaccaacccagccagcgtatccacccccgcccgggtccccgcggaagcggaacggtgtatgtgatatgctaattaaatacatgccacgtacttatggtgtctgattggtccttgtctgtgccggaggtggggcgggggccccgcccggggggcggaactaggaggggtttgggagagccggccccggcaccacgggtataaggacatccaccacccggccggtggtggtgtgcagccgtgttccaaccacggtcacgcttcggtgcctctccccgattcgggcccggtcgcttgctaccggtgcgccaccaccagaggccatatccgacaccccagccccgacggcagccgacagcccggtcgtacaataaaaacaaaacatttcaaacaaatcgccccacgtgttgtccttctttgctcatggccggcggggcgtgggtcacggcagatggcgggggtgggcccggcgtacggcctgggtgggcggagggaactaacccaacgtataaatccgtccccgctccaaggccggtgtcatagtgcccttaggagcttcccgcccgggcgcatccccccttttgcactatgacagcgacccccctcaccaacctgttcttacgggccccggacataacccacgtggcccccccttactgcctcaacgccacctggcaggccgaaacggccatgcacaccagcaaaacggactccgcttgcgtggccgtgcggagttacctggtccgcgcctcctgtgagaccagcggcacaatccactgctttttctttgcggtatacaaggacacccaccatacccctccgctgattaccgagctccgcaactttgcggacctggttaaccacccgccggtcctacgcgaactggaggataagcgcggggtgcggctgcggtgtgcgcggccgtttagcgtcgggacgattaaggacgtctctgggtccggcgcgtcctcggcgggagagtacacgataaacgggatcgtgtaccactgccactgtcggtatccgttctcaaaaacatgctggatgggggcctccgcggccctacagcacctgcgctccatcagctccagcggcatggccgcccgcgcggcagagcatcgacgcgtcaagattaaaattaaggcgtgatctccaaccccccatgaatgtgtgtaaccccccccccaaaaaaataaagagccgtaacccaaccaaaccaggcgtggtgtgagtttgtggacccaaagccctcagagacaatgcgacaggccagtatggaccgtgatacttttatttattaactcacaggggcgcttaccgccacaggaataccagaataatgaccaccacaatcgcgaccaccccaaatacagcatggcgccacaccacgccacaacagccctgtcgccggtatggggcatgatcagacgagccgcgcgccgcgcgttgggccctgtacagctcgcgcgaattgaccctaggaggccgccacgcgcccgagttttgcgttcgtcgctggtcgtcgggcgccaaagccccggacggctgttcggtcgaacgaacggccacgacagtggcataggttggggggtggtccgacatagcctcggcgtacgtcgggaggcccgacaagaggtcccttgtgatgtcgggtggggccacaagcctggtttccggaagaaacaggggggttgccaataacccgccagggccaaaactccggcgctgcgcacgtcgttcggcgcggcgccgggcgcgccgagcggctcgctgggcggcttggcgtgagcggccccgctccgacgcctcgccctctccggaggaggttggcggaattggcacggacgacaggggcccagcagagtacggtggaggtgggtccgtgggggtgtccagatcaataacgacaaacggcccctcgttcctaccagacaagctatcgtaggggggcgggggatcagcaaacgcgttccccgcgctccatagacccgcgtcgggttgcgccgcctccgaagccatggatgcgccccaaagccacgactcccgcgcgctaggtccttggggtaagggaaaaggccctactccccatccaagccagccaagttaacgggctacgccttcggggatgggactggcaccccggcggattttgttgggctggtacgcgtcgcccaaccgagggccgcgtccacgggacgcgccttttataaccccgggggtcattcccaacgatcacatgcaatctaacgagtcttcggacctcgcgggggccgcttaagcggtggttagggtttgtctgacgcggggggagggggaaggaacgaaacactctcattcggaggcagctcggggtttggtcttggtggccacgggcacgcagaagagcgccgcgatcctcttaagcacccccccgccctccgtggaggcgggggtttggtcggcgggtggtacctggcgggccgctggctcgggcgggtcgcgcgccccagagtgtgaccttttcggtctgctcgcagacccccgggcagcgccgccgcggcggcgacgggctcgctgggtcctaggctccatggggaccgtatacgtggacaggctctggagcatccgcacgactgcggtgatattaccggagaccttctgcgggacgagccgggtcacgcggctgacgcggagcgtccgttgggcgacaaacaccaggacggggcacaggtacactatcttgtcacccggaggcgcgagggactgcaggagcttcagggagtggcgcagctgcttcatccccgtggcccgttgctcgcgtttgctggcggtgtccccggaagaaatatatttgcatgtctttagttctatgatgacacaaaccccgcccagcgtcttgtcattggcgaattcgaacacgcagatgcagtcggggcggcgcggtcccaggtccacttcgcatattaaggtgacgcgtgtggcctcgaacaccgagcgaccctgcagcgacccgcttaaaccggtccgccttttttgcacgggtaagcaccttgggtgggcggaggaggggggacgcgggggcggaggaggggggacgcgggggcggaggaggggggacgcgggggcggaggaggggggacgcgggggcggaggaggggggacgcggggggcggaggaggggggacgcagggggcggaggagggggctcacccgcgttcgtgccttcccgcaggaggaacgccctcgtcgaggcgaccggcggcgaccgttgcgtggaccgcttcctgctcgtcggggggggagccactgtggtcctccgggacgttttctggatggccgacatttccccaggcgcttttgtgccttgtgtaaaagcgcggcgtcccgctctccgatccccgcccctgggcacgcgcaagcgcaagcgccctgcccgccccctctcatcggagtctgaggtcgaatccgagacagccttggagtctgaggtcgaatccgagacagcatcggattcgaccgagtctggggaccaggaggaagccccccgcatcggtggccgtagggccccccggaggcttggggggcggttttttctggacatgtcggcggaatccaccacggggacggaaacggatgcgtcggtgtcggacgaccccgacgacacgtccgactggtcttgtgacgacattcccccacgacccaagcgggcccgggtaaacctgcggctcactagctctcccgatcggcgggatggggttatttttcctaagatggggcgggtccggtctacccgggaaacgcagccccgggcccccaccccgtcggccccaagcccaaatgcaatgctccggcgctcggtgcgccaggcccagaggcggagcagcgcacgatggacccccgacctgggctacatgcgccagtgtatcaatcagctgtttcgggtcctgcgggtcgcccgggacccccacggcagtgccaaccgcctgcgccacctgatacgcgactgttacctgatgggatactgccgagcccgtctggccccgcgcacgtggtgccgcttgctgcaggtgtccggcggaacctggggcatgcacctgcgcaacaccatacgggaggtggaggctcgattcgacgccaccgcagaacccgtgtgcaagcttccttgtttggaggccagacggtacggcccggagtgtgatcttagtaatctcgagattcatctcagcgcgacaagcgatgatgaaatctccgatgccaccgatctggaggccgccggttcggaccacacgctcgcgtcccagtccgacacggaggatgccccctcccccgttacgctggaaaccccagaaccccgcgggtccctcgctgtgcgtctggaggatgagtttggggagtttgactggaccccccaggagggctcccagccctggctgtctgcggtcgtggccgataccagctccgtggaacgcccgggcccatccgattctggggcgggtcgcgcagcagaagaccgcaagtgtctggacggctgccggaaaatgcgcttctccaccgcctgcccctatccgtgcagcgacacgtttctccggccgtgagtccggtcgccccgacccccttgtatgtccccaaaataaaagaccaaaatcaaagcgtttgtcccagcgtcttaatggcgggaagggcggagagaaacagaccacgcgtacatggggggtgtttgggggtttattgacatcggggctacagggtggtaaccggatagcagatgtgaggaagtctgggccgttcgccgcgaacggcgatcagagggtccgtttcttgcggaccacggcccggtgatgtgggttgctcgtctaaaatctcgggcatacccatacacgcacaacacggacgccgcaccgaatgggacgtcgtaagggggtgggaggtagctgggtggggtttgtgcagagcaatcagggaccgcagccagcgcatacaatcgcgctcccgtccgttggtcccgggcaggaccacgccgtactggtattcgtaccggctgagcagggtctccagggggtggttgggtgccgcggggaacggggtccacgccacggtccactcgggcaaaaaccgagtcggcacggcccacggttctcccacccacgcgtctggggtcttgatggcgataaatcttaccccgagccggattttttgggcgtattcgagaaacggcacacacagatccgccgcgcctaccacccacaagtggtagaggcgaggggggctgggttggtctcggtgcaacagtcggaagcacgccacggcgtccacgacctcggtgctctccaaggggctgtcctccgcaaacaggcccgtggtggtgtttggggggcagcgacaggacctagtgcgcacgatcgggcgggtgggtttgggtaagtccatcagcggctcggccaaccgtcgaaggttggccgggcgaacgacgaccggggtacccaggggttctgatgccaaaatgcggcactgcctaagcaggaagctccacagggccgggcttgcgtcgacggaagtccggggcagggcgttgttctggtcaaggagggtcattacgttgacgacaacaacgcccatgttggtatattacaggcccgtgtccggtttggggcacttgcagatttgtaaggccacgcacggcggggagacaggccgacgcgggggctgctctaaaaatttaagggccctacggtccacagacccgccttcccgggggggcccttggagcgaccggcagcggaggcgtccgggggaggggagggttatttacgggggggtaggtcagggggtgggtcgtcaaactgccgctccttaaaaccccggggcccgtcgttcggggtgctcgttggttggcactcacggtgcggcgaatggcctgtcgtaagttttgtcgcgtttacgggggacagggcaggaggaaggaggaggccgtcccgccggagacaaagccgtcccgggtgtttcctcatggccccttttataccccagccgaggacgcgtgcctggactccccgcccccggagacccccaaaccttcccacaccacaccacccggcgatgccgagcgcctgtgtcatctgcaggagatcctggcccagatgtacggaaaccaggactaccccatagaggacgaccccagcgcggatgccgcggacgatgtcgacgaggacgccccggacgacgtggcctatccggaggaatacgcagaggagctttttctgcccggggacgcgaccggtccccttatcggggccaacgaccacatccctcccccgcgtggcgcatctccccccggtatacgacgacgcagccgggatgagattggggccacgggatttaccgcagaagagctggacgccatggacaggcaggcggctcgagccatcagccgcggcggcaagcccccctcgaccatggccaagctggtgactggcatgggctttacgatccacggagcgctcaccccaggatcggaggggtgtgtctttgacagcagccacccagattacccccaacgggtaatcgtgaaggcggggtggtacacgagcacgagccacgaggcgcgactgctgaggcgactggaccacccggcgatcctgcccctcctggacctgcatgtcgtctccggggtcacgtgtctggtcctccccaagtaccaggccgacctgtatacctatctgagtaggcgcctgaacccactgggacgcccgcagatcgcagcggtctcccggcagctcctaagcgccgttgactacattcaccgccagggcattatccaccgcgacattaagaccgaaaatatttttattaacacccccgaggacatttgcctgggggactttggtgccgcgtgcttcgtgcagggttcccgatcaagccccttcccctacggaatcgccggaaccatcgacaccaacgcccccgaggtcctggccggggatccgtataccacgaccgtcgacatttggagcgccggtctggtgatcttcgagactgccgtccacaacgcgtccttgttctcggccccccgcggccccaaaaggggcccgtgcgacagtcagatcacccgcatcatccgacaggcccaggtccacgttgacgagttttccccgcatccagaatcgcgcctcacctcgcgctaccgctcccgcgcggccgggaacaatcgcccgccttacacccgaccggcctggacccgctactacaagatggacatagacgtcgaatatctggtttgcaaagccctcaccttcgacggcgcgcttcgccccagcgccgcagagctgctttgtttgccgctgtttcaacagaaatgaccgcccccggggggcggtgctgtttgcgggttggcacaaaaagaccccgacccgcgtctgtggtgtttttggcatcatgtcgccgggcgccatgcgtgccgttgttcccattatcccattccttttggttcttgtcggtgtatcgggggttcccaccaacgtctcctccaccacccaaccccaactccagaccaccggtcgtccctcgcatgaagcccccaacatgacccagaccggcaccaccgactctcccaccgccatcagccttaccacgcccgaccacacaccccccatgccaagtatcggactggaggaggaggaggaagaggaggagggggccggggatggcgaacatcttaaggggggagatgggacccgtgacaccctaccccagtccccgggtccagccgtcccgttggccggggatgacgagaaggacaaacccaaccgtcccgtagtcccaccccccggtcccaacaactcccccgcgcgccccgagaccagtcgaccgaagacaccccccaccagtatcgggccgctggcaactcgacccacgacccaactcccctcaaaggggcgacccttggttccgacgcctcaacataccccgctgttctcgttcctcactgcctcccccgccctggacaccctcttcgtcgtcagcaccgtcatccacaccttatcgtttgtgtgtattgttgctatggcgacacacctgtgtggtggttggtccagacgcgggcgacgcacacaccctagcgtgcgttacgtgtgcctgccgcccgaacgcgggtagggtatggggcggggatggggagagcccacacgcggaaagcaagaacaataaaggcggcgggatctagttgatatgcgtctctgggtgtttttggggtgtggtgggcgcggggcggtcattggacgggggtgcagttaaatacatgcccgggacccatgaagcatgcgcgacttccgggcctcggaacccacccgaaacggccaacggacgtctgagccaggcctggctatccggagaaacagcacacgacttggcgttctgtgtgtcgcgatgtctctgcgcgcagtctggcatctggggcttttgggaagcctcgtgggggctgttcttgccgccacccatctgggacctgcggccaacacaacggaccccttaacgcacgccccagtgtcccctcaccccagccccctggggggctttgccgtccccctcgtagtcggtgggctgtgtgccgtagtcctgggggcggcgtgtctgcttgagctcctgcgtcgtacgtgccgcgggtgggggcgttaccatccctacatggacccagttgtcgtataattttttcccccccccccttctccgcatgggtgatgtcgggtccaaactcccgacaccaccagctggcatggtataaatcaccggtgcgccccccaaaccatgtccggcagggggatggggggcgaatgcggagggcacccaacaacaccgggctaaccaggaaatccgtggccccggcccccaacaaagatcgcggtagcccggccgtgtgacattatcgtccataccgaccacaccgacgaatcccctaagggggaggggccattttacgaggaggaggggtataacaaagtctgtctttaaaaagcaggggttagggagttgttcggtcataagcttcagtgcgaacgaccaactaccccgatcatcagttatccttaaggtctcttttgtgtggtgcgttccggtatggggggggctgccgccaggttgggggccgtgattttgtttgtcgtcatagtgggcctccatggggtccgcggcaaatatgccttggcggatgcctctctcaagatggccgaccccaatcgctttcgcggcaaagaccttccggtcctggaccagctgaccgaccctccgggggtccggcgcgtgtaccacatccaggcgggcctaccggacccgttccagccccccagcctcccgatcacggtttactacgccgtgttggagcgcgcctgccgcagcgtgctcctaaacgcaccgtcggaggccccccagattgtccgcggggcctccgaagacgtccggaaacaaccctacaacctgaccatcgcttggtttcggatgggaggcaactgtgctatccccatcacggtcatggagtacaccgaatgctcctacaacaagtctctgggggcctgtcccatccgaacgcagccccgctggaactactatgacagcttcagcgccgtcagcgaggataacctggggttcctgatgcacgcccccgcgtttgagaccgccggcacgtacctgcggctcgtgaagataaacgactggacggagattacacagtttatcctggagcaccgagccaagggctcctgtaagtacgccctcccgctgcgcatccccccgtcagcctgcctctccccccaggcctaccagcagggggtgacggtggacagcatcgggatgctgccccgcttcatccccgagaaccagcgcaccgtcgccgtatacagcttgaagatcgccgggtggcacgggcccaaggccccatacacgagcaccctgctgcccccggagctgtccgagacccccaacgccacgcagccagaactcgccccggaagaccccgaggattcggccctcttggaggaccccgtggggacggtggcgccgcaaatcccaccaaactggcacatcccgtcgatccaggacgccgcgacgccttaccatcccccggccaccccgaacaacatgggcctgatcgccggcgcggtgggcggcagtctcctggcagccctggtcatttgcggaattgtgtactggatgcaccgccgcactcggaaagccccaaagcgcatacgcctcccccacatccgggaagacgaccagccgtcctcgcaccagcccttgttttactagatacccccccttaatgggtgcgggggggtcaggtctgcggggttgggatgggaccttaactccatataaagcgagtctggaaggggggaaaggcggacagtcgataagtcggtagcgggggacgcgcacctgttccgcctgtcgcacccacagctttttcgcgaaccgtcccgtttcgggatgccgtgccgcccgttgcagggcctggtgctcgtgggcctctgggtctgtgccaccagcctggttgtccgtggccccacggtcagtctggtatcaaactcatttgtggacgccggggccttggggcccgacggcgtagtggaggaagacctgcttattctcggggagcttcgctttgtgggggaccaggtcccccacaccacctactacgatggggtcgtagagctgtggcactaccccatgggacacaaatgcccacgggtcgtgcatgtcgtcacggtgaccgcgtgcccacgtcgccccgccgtggcatttgccctgtgtcgcgcgaccgacagcactcacagccccgcatatcccaccctggagctgaatctggcccaacagccgcttttgcgggtccggagggcgacgcgtgactatgccggggtgtacgtgttacgcgtatgggtcggggacgcaccaaacgccagcctgtttgtcctggggatggccatagccgccgaaggtactctggcgtacaacggctcggcccatggctcctgcgacccgaaactgcttccgtcttcggccccgcgtctggccccggcgagcgtataccaacccgcccctaacccggcctccaccccctcgaccaccacctccaccccctcgaccaccatccccgctccccaagcatcgaccacacccttccccacgggagacccaaaaccccaacctcacggggtcaaccacgaacccccatcgaatgccacgcgagcgacccgcgactcgcgatatgcgctaacggtgacccagataatccagatagccatccccgcgtccattatagccctggtgtttctggggagctgtatttgctttatacacagatgtcaacgccgctaccgacgctcccgccgcccgatttacagcccccagatacccacgggcatctcatgcgcggtgaacgaagcggccatggcccgcctcggagccgagctcaaatcgcatccgagcaccccccccaaatcccggcgccggtcgtcacgcacgccaatgccctccctgacggccatcgccgaagagtcggagcccgcgggggcggctgggcttccgacgccccccgtggaccccacgacatccaccccaacgcctcccctgttggtataggtccacggccactggccgggggcaccacataaccgaccgcagtcactgagttgggaataaaccggtattatttacctatatccgtgtatgtccatttctttcttcccccccccccccggaaaccaaagaaggaagcaaagaatggatgggaggagttcaggaagccggggagagggcccgcggcgcatttaaggcgttgttgtgttgactttggctcttctggcgggttggtgcggtgctgtttgttgggctcccattttacccgaagatcggctgctatccccgggacatggatcgcggggcggtggtggggtttcttctcggtgtttgtgttgtatcgtgcttggcgggaacgcccaaaacgtcctggagacgggtgagtgtcggcgaggacgtttcgttgcttccagctccggggcctacggggcgcggcccgacccagaaactactatgggccgtggaacccctggatgggtgcggccccttacacccgtcgtgggtctcgctgatgccccccaagcaggtgcccgagacggtcgtggatgcggcgtgcatgcgcgctccggtcccgctggcgatggcgtacgcccccccggccccatctgcgaccgggggtctacgaacggacttcgtgtggcaggagcgcgcggccgtggttaaccggagtctggttattcacggggtccgagagacggacagcggcctgtataccctgtccgtgggcgacataaaggacccggctcgccaagtggcctcggtggtcctggtggtgcaaccggccccagttccgaccccacccccgaccccagccgattacgacgaggatgacaatgacgagggcgaggacgaaagtctcgccggcactcccgccagcgggaccccccggctcccgcctccccccgcccccccgaggtcttggcccagcgcccccgaagtctcacatgtgcgtggggtgaccgtgcgtatggagactccggaagctatcctgttttcccccggggagacgttcagcacgaacgtctccatccatgccatcgcccacgacgaccagacctactccatggacgtcgtctggttgaggttcgacgtgccgacctcgtgtgccgagatgcgaatatacgaatcgtgtctgtatcacccgcagctcccagaatgtctgtccccggccgacgcgccgtgcgccgcgagtacgtggacgtctcgcctggccgtccgcagctacgcggggtgttccagaacaaaccccccaccgcgctgttcggccgaggctcacatggagcccgtcccggggctggcgtggcaggcggcctccgtcaatctggagttccgggacgcgtccccacaacactccggcctgtatctgtgtgtggtgtacgtcaacgaccatattcacgcctggggccacattaccatcagcaccgcggcgcagtaccggaacgcggtggtggaacagcccctcccacagcgcggcgcggatttggccgagcccacccacccgcacgtcggggcccctccccacgcgcccccaacccacggcgccctgcggttaggggcggtgatgggggccgccctgctgctgtctgcgctggggttgtcggtgtgggcgtgtatgacctgttggcgcaggcgtgcctggcgggcggttaaaagcagggcctcgggtaaggggcccacgtacattcgcgtggccgacagcgagctgtacgcggactggagctcggacagcgagggagaacgcgaccaggtcccgtggctggcccccccggagagacccgactctccctccaccaatggatccggctttgagatcttatcaccaacggctccgtctgtatacccccgtagcgacgggcatcaatctcgccgccagctcacaacctttggatccggaaggcccgatcgccgttactcccaggcctccgattcgtccgtcttctggtaaggcgccccatcccgaggccccacgtcggtcgccgaactgggcgaccgccggcgaggtggacgtcggagacgagctaatcgcgatttccgacgaacgcggacccccccgacatgaccgcccgcccctcgccacgtcgaccgcgccctcgccacacccgcgacccccgggctacacggccgttgtctccccgatggccctccaggctgtcgacgccccctccctgtttgtcgcctggctggccgctcggtggctccggggggcttccggcctgggggccgtcctgtgtgggattgcgtggtatgtgacgtcaattgcccgaggcgcacaaagggccggtggtccgcctagccgcagcaaattaaaaatcgtgagtcacagcgaccgcaacttcccacccggagctttcttccggcctcgatgacgtcccggctctccgatcccaactcctcagcgcgatccgacatgtccgtgccgctttatcccacggcctcgccagtttcggtcgaagcctactactcggaaagcgaagacgaggcggccaacgacttcctcgtacgcatgggccgccaacagtcggtattaaggcgttgacgcagacgcacccgctgcgtcggcatggtgatcgcctgtctcctcgtggccgttctgtcgggcggatttggggcgctcctgatgtggctgctccgctaaaagaccgcatcgacacgcgcgtccttcttgtcgtctctcttcccccccatcaccccgcaatttgcacccagcctttaactacattaaattgggttcgattggcaatgttgtctcccggttgatttttgggtgggtggggagtgggtgggtggggagtgggtgggtggggagtgggtgggtggggagtgggtgggtggggagtgggtgggtggggagtgggtgggtggggagtgggtgggtggggagtgggtgggtggggagtgggtgggtggggagtggcaaggaagaaacaagcccgaccaccagacagaaaatgtaaccatacccaaaccgactctgggggctgtttgtggggtcggaaccataggatgaacaaaccaccccgtacctcccgcacccaagggtgcgggtggctcatcggcatctgtccggtatgggttgttccccacccactcgcgttcggacgtcttagaatcatggcggttttctatgccgacatcggttttctcccccgcaataagacacgatgcgataaaatctgtttgtaaaatttattaagggtacaaattgccctagcacaggggtggggttagggccgggtccccacacccaaacgcaccaaacagatgcaggcagtgggtcgagtacagccccgcgtacgaacacgtcgatgcgtgtgtcagacagcaccagaaagcacaggccatcaacaggtcgtgcatgtgtcggtgggtttggacgcggggggccatggtggtgataaagttaatggccgccgtccgccagggccacaggggcgacgtctcttggttggcccggagccactgggtgtggaccagccgcgcgtggcggcccaacatggcccctgtagccgggggcgggggatcgcgcacgtttgcagcgcacatgcgagacacctcgaccacggttcgaaagaaggcccggtggtccgcgggcaacatcaccaggtgcgcaagcgcccgggcgtccagagggtagagccctgagtcatccgaggttggctcatcgcccgggtcttgccgcaagtgcgtgtgggttgggcttccggtgggcgggacgcgaaccgcggtgtggatcccgacgcgggcccgagcgtatgctccatcttgtggggagaaggggtctgggctcgccaggggggcatacttgcccgggctatacagacccgcgagccgtacgtggttcgcggggggtgcgtggggtccggggctccctgggagaccggggttgtcgtggatccctggggtcacgcggtaccctggggtctctgggagctcgcggtactctgggttccctaggttctcggggtggtcgcggaacccggggctcccggggaacacgcggtgtcctggggattgttggcggtcggacggcttcagatggcttcgagatcgtagtgtccgcaccgactcgtagtagacccgaatctccacattgccccgccgcttgatcattatcaccccgttgcgggggtccggagatcatgcgcgggtgtcctcgaggtgcgtgaacacctctggggtgcatgccggcggacggcacgccttttaagtaaacatctgggtcgcccggcccaactggggccgggggttgggtctggctcatctcgagagacacgggggggaaccaccctccgcccagagactcgggtgatggtcgtacccgggacctacttgtcgtcatcgtctttgtagtcgaccgagttcgccgggccggctccgcgggccagggcccgggcacgggcctcgggccccaggcacggcccgatgaccgcctcggcctccgccacccggcgccggaaccgagcccggtcggcccgctcgcgggcccacgagccgcggcgcgccaggcgggcggccgaggcccagaccaccaggtggcgcacccggacgtggggcgagaagcgcacccgcgtgggggtcgcgggggtcgcgggggtcgcggggggcttcggcgccccctccccgcccgcgcgtcgcaggcgcaggcgcgccaggtgctctgcggtgacgcgcaggcggagggcgaggcgcggcggaaggcggaaggggcgtgagggggggtgggaggggttagccccgccccccgggcccgcgccgggcggtggggaccgggggcggggggcggcggcggtgggccgggcctctggcgccggctcgggcggggggctgtccggccagtcgtcgtcgtcgtcgtcggacgcggactcgggaacgtggagccactggcgcagcagcagcgaacaagaaggcgggggcccactggcggggggcggcggcggggcggccgcgggcgcgctcctgaccacgggttccgagttgggcgtggaggttacctgggactgtgcggttgggaccgcgcccgtgggcccgggcggccgggggcggcgggggccgcgatggcggcggcgggccatgtttaaacagctctgcttatatagacctcccaccgtacacgcctaccgcccatttgcgtcaatggggcggagttgttacgacattttggaaagtcccgttgattttggtgccaaaacaaactcccattgacgtcaatggggtggagacttggaaatccccgtgagtcaaaccgctatccacgcccattgatgtactgccaaaaccgcatcaccatggtaatagcgatgactaatacgtagatgtactgccaagtaggaaagtcccataaggtcatgtactgggcataatgccaggcgggccatttaccgtcattgacgtcaatagggggcgtacttggcatatgatacacttgatgtactgccaagtgggcagtttaccgtaaatactccacccattgacgtcaatggaaagtccctattggcgttactatgggaacatacgtcattattgacgtcaatgggcgggggtcgttgggcggtcagccaggcgggccatttaccgtaagttatgtaacgacaacttcgtatagaaaggtatatacgaagttgtcaattctcatgtttgacagcttatcatcgaatttctgccattcatccgcttattatcacttattcaggcgtagcaaccaggcgtttaagggcaccaataactgccttaaaaaaattagaaaaactcatcgagcatcaaatgaaactgcaatttattcatatcaggattatcaataccatatttttgaaaaagccgtttctgcggcgcgcaattccacttgcaattacataaaaaattccggcggtttttcgcgtgtgactcaatgtcgaaatacctgcctaatgaacatgaacatcgcccaaatgtatttgaagacccgctgggagaagttcaagatatataagtaacaagcagccaatagtataaaaaaaaatctgagtttattacctttcctggaatttcagtgaaaaactgctaattatagagagatatcacagagttactcactaatgactaacgaaaaggtctggatagagaagttggataatccaactctttcagtgttaccacatgactttttacgcccacaacaagaaccttatacgaaacaagctacatattcgttacagctacctcagctcgatgtgcctcatgatagtttttctaacaaatacgctgtcgctttgagtgtatgggctgcattgatatatagagtaaccggtgacgatgatattgttctttatattgcgaataacaaaatcttaagattcaatattcaaccaacgtggtcatttaatgagctgtattctacaattaacaatgagttgaacaagctcaattctattgaggccaatttttcctttgacgagctagctgaaaaaattcaaagttgccaagatctggaaaggacccctcagttgttccgtttggcctttttggaaaaccaagatttcaaattagacgagttcaagcatcatttagtggactttgctttgaatttggataccagtaataatgcgcatgttttgaacttaatttataacagcttactgtattcgaatgaaagagtaaccattgttgcggaccaatttactcaatatttgactgctgcgctaagcgatccatccaattgcataactaaaatctctctgatcaccgcatcatccaaggatagtttacctgatccaactaagaacttgggctggtgcgatttcgtggggtgtattcacgacattttccaggacaatgctgaagccttcccagagagaacctgtgttgtggagactccaacactaaattccgacaagtcccgttctttcacttatcgcgacatcaaccgcacttctaacatagttgcccattatttgattaaaacaggtatcaaaagaggtgatgtagtgatgatctattcttctaggggtgtggatttgatggtatgtgtgatgggtgtcttgaaagccggcgcaaccttttcagttatcgaccctgcatatcccccagccagacaaaccatttacttaggtgttgctaaaccacgtgggttgattgttattagagctgctggacaattggatcaactagtagaagattacatcaatgatgaattggagattgtttcaagaatcaattccatcgctattcaagaaaatggtaccattgaaggtggcaaattggacaatggcgaggatgttttggctccatatgatcactacaaagacaccagaacaggtgttgtagttggaccagattccaacccaaccctatctttcacatctggttccgaaggtattcctaagggtgttcttggtagacatttttccttggcttattatttcaattggatgtccaaaaggttcaacttaacagaaaatgataaattcacaatgctgagcggtattgcacatgatccaattcaaagagatatgtttacaccattatttttaggtgcccaattgtatgtccctactcaagatgatattggtacaccgggccgtttagcggaatggatgagtaagtatggttgcacagttacccatttaacacctgccatgggtcaattacttactgcccaagctactacaccattccctaagttacatcatgcgttctttgtgggtgacattttaacaaaacgtgattgtctgaggttacaaaccttggcagaaaattgccgtattgttaatatgtacggtaccactgaaacacagcgtgcagtttcttatttcgaagttaaatcaaaaaatgacgatccaaactttttgaaaaaattgaaagatgtcatgcctgctggtaaaggtatgttgaacgttcagctactagttgttaacaggaacgatcgtactcaaatatgtggtattggcgaaataggtgagatttatgttcgtgcaggtggtttggccgaaggttatagaggattaccagaattgaataaagaaaaatttgtgaacaactggtttgttgaaaaagatcactggaattatttggataaggataatggtgaaccttggagacaattctggttaggtccaagagatagattgtacagaacgggtgatttaggtcgttatctaccaaacggtgactgtgaatgttgcggtagggctgatgatcaagttaaaattcgtgggttcagaatcgaattaggagaaatagatacgcacatttcccaacatccattggtaagagaaaacattactttagttcgcaaaaatgccgacaatgagccaacattgatcacatttatggtcccaagatttgacaagccagatgacttgtctaagttccaaagtgatgttccaaaggaggttgaaactgaccctatagttaagggcttaatcggttaccatcttttatccaaggacatcaggactttcttaaagaaaagattggctagctatgctatgccttccttgattgtggttatggataaactaccattgaatccaaatggtaaagttgataagcctaaacttcaattcccaactcccaagcaattaaatttggtagctgaaaatacagtttctgaaactgacgactctcagtttaccaatgttgagcgcgaggttagagacttatggttaagtatattacctaccaagccagcatctgtatcaccagatgattcgtttttcgatttaggtggtcattctatcttggctaccaaaatgatttttaccttaaagaaaaagctgcaagttgatttaccattgggcacaattttcaagtatccaacgataaaggcctttgccgcggaaattgacagaattaaatcatcgggtggatcatctcaaggtgaggtcgtcgaaaatgtcactgcaaattatgcggaagacgccaagaaattggttgagacgctaccaagttcgtacccctctcgagaatattttgttgaacctaatagtgccgaaggaaaaacaacaattaatgtgtttgttaccggtgtcacaggatttctgggctcctacatccttgcagatttgttaggacgttctccaaagaactacagtttcaaagtgtttgcccacgtcagggccaaggatgaagaagctgcatttgcaagattacaaaaggcaggtatcacctatggtacttggaacgaaaaatttgcctcaaatattaaagttgtattaggcgatttatctaaaagccaatttggtctttcagatgagaagtggatggatttggcaaacacagttgatataattatccataatggtgcgttagttcactgggtttatccatatgccaaattgagggatccaaatgttatttcaactatcaatgttatgagcttagccgccgtcggcaagccaaagttctttgactttgtttcctccacttctactcttgacactgaatactactttaatttgtcagataaacttgttagcgaagggaagccaggcattttagaatcagacgatttaatgaactctgcaagcgggctcactggtggatatggtcagtccaaatgggctgctgagtacatcattagacgtgcaggtgaaaggggcctacgtgggtgtattgtcagaccaggttacgtaacaggtgcctctgccaatggttcttcaaacacagatgatttcttattgagatttttgaaaggttcagtccaattaggtaagattccagatatcgaaaattccgtgaatatggttccagtagatcatgttgctcgtgttgttgttgctacgtctttgaatcctcccaaagaaaatgaattggccgttgctcaagtaacgggtcacccaagaatattattcaaagactacttgtatactttacacgattatggttacgatgtcgaaatcgaaagctattctaaatggaagaaatcattggaggcgtctgttattgacaggaatgaagaaaatgcgttgtatcctttgctacacatggtcttagacaacttacctgaaagtaccaaagctccggaactagacgataggaacgccgtggcatctttaaagaaagacaccgcatggacaggtgttgattggtctaatggaataggtgttactccagaagaggttggtatatatattgcatttttaaacaaggttggatttttacctccaccaactcataatgacaaacttccactgccaagtatagaactaactcaagcgcaaataagtctagttgcttcaggtgctggtgctcgtggaagctccgcagcagcttaaggttgagcattacgtatgatatgtccatgtacaataattaaatatgaattaggagaaagacttagcttcttttcgggtgatgtcacttaaaaactccgagaataatatataataagagaataaaatattagttattgaataagaactgtaaatcagctggcgttagtctgctaatggcagcttcatcttggtttattgtagcatgaatcatatttgcctttttttcctgtaattcaatgattcttgcttctatactatcctcaatgcaaaaccttgtgatcttcacaggtcgatactgaccaattctatgaactctatcaccactttgccattcaacactagggttccaccatgggtctaaaatgaatacttgcgaagctgcccgggcggccgcccaactacgcagccgatcaacaacagaaacgcgacggtcgagatgaggaacgcacactggagcctttatcagatggtgttgatttcaattactccggagcgtgatgcggatcaaagtaaccgcgatggaaggtgggggactcgaaatagatccgttcttagccctgcgaaacatctactgtacaccacatgcaacagccacaattctcatgtttgacagcttatcatcgaatttctgccattcatccgcttattatcacttattcaggcgtagcaaccaggcgtttaagggcaccaataactgccttaaaaaaattagaaaaactcatcgagcatcaaatgaaactgcaatttattcatatcaggattatcaataccatatttttgaaaaagccgtttctgtaatgaaggagaaaactcaccgaggcagttccataggatggcaagatcctggtatcggtctgcgattccgactcgtccaacatcaatacaacctattaatttcccctcgtcaaaaataaggttatcaagtgagaaatcaccatgagtgacgactgaatccggtgagaatggcaaaagtttatgcatttctttccagacttgttcaacaggccagccattacgctcgtcatcaaaatcactcgcatcaaccaaaccgttattcattcgtgattgcgcctgagccagacgaaatacgcgatcgctgttaaaaggacaattacaaacaggaatcgaatgcaaccggcgcaggaacactgccagcgcatcaacaatattttcacctgaatcaggatattcttctaatacctggaatgctgtttttccggggatcgcagtggtgagtaaccatgcatcatcaggagtacggataaaatgcttgatggtcggaagaggcataaattccgtcagccagtttagtctgaccatctcatctgtaacatcattggcaacgctacctttgccatgtttcagaaacaactctggcgcatcgggcttcccatacaatcgatagattgtcgcacctgattgcccgacattatcgcgagcccatttatacccatataaatcagcatccatgttggaatttaatcgcggcctcgagcaagacgtttcccgttgaatatggctcattttagcttccttagctcctgaaaatctcgataactcaaaaaatacgtccggtagtgatcttatttcattatggtgaaagttggaacctcttacgtgccgatcaacgtccctgggtccttttcatcacgtgggtgatgctgccaacttactgatttagtgtatgatggtgtttttgaggtgctccagtggcttctgtttctatcagctgtccctcctgttcagctactgacggggtggtgcgtaacggcaaaagcaccgccggacatcagcgctatctctgctctcactgccgtaaaacatggcaactgcagttcacttacaccgcttctcaacccggtacgcaccagaaaatcattgatatggccatgaatggcgttggatgccgggcaacagcccgcattatgggcgttggcctcaacacgattttacgtcacttaaaaaactcaggccgcagtcggtaacctcgcgcatacagccgggcagtgacgtcatcgtctgcgcggaaatggacgaacagtggggctatgtcggggctaaatcgcgccagcgctggctgttttacgcgtatgacagtctccggaagacggttgttgcgcacgtattcggtgaacgcactatggcgacgctggggcgtcttatgagcctgctgtcaccctttgacgtggtgatatggatgacggatggctggccgctgtatgaatcccgcctgaagggaaagctgcacgtaatcagcaagcgatatacgcagcgaattgagcggcataacctgaatctgaggcagcacctggcacggctgggacggaagtcgctgtcgttctcaaaatcggtggagctgcatgacaaagtcatcgggcattatctgaacataaaacactatcaataagttggagtcattacccatcacgtgctataaaaataattataatttaaattttttaatataaatatataaattaaaaatagaaagtaaaaaaagaaattaaagaaaaaatagtttttgttttccgaagatgtaaaagactctagggggatcgccaacaaatactaccttttatcttgctcttcctgctctcaggtattaatgccgaattgtttcatcttgtctgtgtagaagaccacacacgaaaatcctgtgattttacattttacttatcgttaatcgaatgtatatctatttaatctgcttttcttgtctaataaatatatatgtaaagtacgctttttgttgaaattttttaaacctttgtttatttttttttcttcattccgtaactcttctaccttctttatttactttctaaaatccaaatacaaaacataaaaataaataaacacagagtaaattcccaaattattccatcattaaaagatacgaggcgcgtgtaagttacaggcaagcgatcttttcgccaaaagttggcccagggcttcccggtatcaacagggacaccaggatttatttattctgcgaagtgatcttccgtcacaggtatttattcgcgataagctcatggagcggcgtaaccgtcgcacaggaaggacagagaaagcgcggatctgggaagtgacggacagaacggtcaggacctggattggggaggcggttgccgccgctgctgctgacggtgtgacgttctctgttccggtcacaccacatacgttccgccattcctatgcgatgcacatgctgtatgccggtataccgctgaaagttctgcaaagcctgatgggacataagtccatcagttcaacggaagtctacacgaaggtttttgcgctggatgtggctgcccggcaccgggtgcagtttgcgatgccggagtctgatgcggttgcgatgctgaaacaattatcctgagaataaatgccttggcctttatatggaaatgtggaactgagtggatatgctgtttttgtctgttaaacagagaagctggctgttatccactgagaagcgagcgaaacagtcgggaaaatctcccattatcgtagagatccgcattattaatctcaggagcctgtgtagcgtttataggaagtagtgttctgtcatgatgcctgcaagcggtaacgaaaacgatttgaatatgccttcaggaacaatagaaatcttcgtgcggtgttacgttgaagtggagcggattatgtcagcaatggacagaacaacctaatgaacacagaaccatgatgtggtctgtccttttacagccagtagtgctcgccgcagtcgagcgacagggcgaagccctcgagctggttgccctcgccgctgggctggcggctgtctatggccctgcaaacgcgccagaaacgccgtcgaagccgtgtgcgagacaccgcggccggccgccggcgttgtggatacctcgcggaaaacttggccctcactgacagatgaggggcggacgttgacacttgaggggccgactcacccggcgcggcgttgacagatgaggggcaggctcgatttcggccggcgacgtggagctggacagcctcgcaaatcggcgaaaacgcctgattttacgcgagtttcccacagatgatgtggacaagcctggggataagtgccctgcggtattgacacttgaggggcgcgactactgacagatgaggggcgcgatccttgacacttgaggggcagagtgctgacagatgaggggcgcacctattgacatttgaggggctgtccacaggcagaaaatccagcatttgcaagggtttccgcccgtttttcggccaccgctaacctgtcttttaacctgcttttaaaccaatatttataaaccttgtttttaaccagggctgcgccctgtgcgcgtgaccgcgcacgccgaaggggggtgcccccccttctcgaaccctcccggtcgagtgagcgaggaagcaccagggaacagcacttatatattctgcttacacacgatgcctgaaaaaacttcccttggggttatccacttatccacggggatatttttataattattttttttatagtttttagatcttcttttttagagcgccttgtaggcctttatccatgctggttctagagaaggtgttgtgacaaattgccctttcagtgtgacaaatcaccctcaaatgacagtcctgtctgtgacaaattgcccttaaccctgtgacaaattgccctcagaagaagctgttttttcacaaagttatccctgcttattgactcttttttatttagtgtgacaatctaaaaacttgtcacacttcacatggatctgtcatggcggaaacagcggttatcaatcacaagaaacgtaaaaatagcccgcgaatcgtccagtcaaacgacctcactgaggcggcatatagtctctcccgggatcaaaaacgtatgctgtatctgttcgttgaccagatcagaaaatctgatggcaccctacaggaacatgacggtatctgcgagatccatgttgctaaatatgctgaaatattcggattgacctctgcggaagccagtaaggatatacggcaggcattgaagagtttcgcggggaaggaagtggttttttatcgccctgaagaggatgccggcgatgaaaaaggctatgaatcttttccttggtttatcaaacgtgcgcacagtccatccagagggctttacagtgtacatatcaacccatatctcattcccttctttatcgggttacagaaccggtttacgcagtttcggcttagtgaaacaaaagaaatcaccaatccgtatgccatgcgtttatacgaatccctgtgtcagtatcgtaagccggatggctcaggcattgtctctctgaaaatcgactggatcatagagcgttaccagctgcctcaaagttaccagcgtatgcctgacttccgccgccgcttcctgcaggtctgtgttaatgagatcaacagcagaactccaatgcgcctctcatacattgagaaaaagaaaggccgccagacgactcatatcgtattttccttccgcgatatcacttccatgacgacaggatagtctgagggttatctgtcacagatttgagggtggttcgtcacatttgttctgacctactgagggtaatttgtcacagttttgctgtttccttcagcctgcatggattttctcatactttttgaactgtaatttttaaggaagccaaatttgagggcagtttgtcacagttgatttccttctctttcccttcgtcatgtgacctgatatcgggggttagttcgtcatcattgatgagggttgattatcacagtttattactctgaattggctatccgcgtgtgtacctctacctggagtttttcccacggtggatatttcttcttgcgctgagcgtaagagctatctgacagaacagttcttctttgcttcctcgccagttcgctcgctatgctcggttacacggctgcggcgagcgctagtgataataagtgactgaggtatgtgctcttcttatctccttttgtagtgttgctcttattttaaacaactttgcggttttttgatgactttgcgattttgttgttgctttgcagtaaattgcaagatttaataaaaaaacgcaaagcaatgattaaaggatgttcagaatgaaactcatggaaacacttaaccagtgcataaacgctggtcatgaaatgacgaaggctatcgccattgcacagtttaatgatgacagcccggaagcgaggaaaataacccggcgctggagaataggtgaagcagcggatttagttggggtttcttctcaggctatcagagatgccgagaaagcagggcgactaccgcacccggatatggaaattcgaggacgggttgagcaacgtgttggttatacaattgaacaaattaatcatatgcgtgatgtgtttggtacgcgattgcgacgtgctgaagacgtatttccaccggtgatcggggttgctgcccataaaggtggcgtttacaaaacctcagtttctgttcatcttgctcaggatctggctctgaaggggctacgtgttttgctcgtggaaggtaacgacccccagggaacagcctcaatgtatcacggatgggtaccagatcttcatattcatgcagaagacactctcctgcctttctatcttggggaaaaggacgatgtcacttatgcaataaagcccacttgctggccggggcttgacattattccttcctgtctggctctgcaccgtattgaaactgagttaatgggcaaatttgatgaaggtaaactgcccaccgatccacacctgatgctccgactggccattgaaactgttgctcatgactatgatgtcatagttattgacagcgcgcctaacctgggtatcggcacgattaatgtcgtatgtgctgctgatgtgctgattgttcccacgcctgctgagttgtttgactacacctccgcactgcagtttttcgatatgcttcgtgatctgctcaagaacgttgatcttaaagggttcgagcctgatgtacgtattttgcttaccaaatacagcaatagcaatggctctcagtccccgtggatggaggagcaaattcgggatgcctggggaagcatggttctaaaaaatgttgtacgtgaaacggatgaagttggtaaaggtcagatccggatgagaactgtttttgaacaggccattgatcaacgctcttcaactggtgcctggagaaatgctctttctatttgggaacctgtctgcaatgaaattttcgatcgtctgattaaaccacgctgggagattagataatgaagcgtgcgcctgttattccaaaacatacgctcaatactcaaccggttgaagatacttcgttatcgacaccagctgccccgatggtggattcgttaattgcgcgcgtaggagtaatggctcgcggtaatgccattactttgcctgtatgtggtcgggatgtgaagtttactcttgaagtgctccggggtgatagtgttgagaagacctctcgggtatggtcaggtaatgaacgtgaccaggagctgcttactgaggacgcactggatgatctcatcccttcttttctactgactggtcaacagacaccggcgttcggtcgaagagtatctggtgtcatagaaattgccgatgggagtcgccgtcgtaaagctgctgcacttaccgaaagtgattatcgtgttctggttggcgagctggatgatgagcagatggctgcattatccagattgggtaacgattatcgcccaacaagtgcttatgaacgtggtcagcgttatgcaagccgattgcagaatgaatttgctggaaatatttctgcgctggctgatgcggaaaatatttcacgtaagattattacccgctgtatcaacaccgccaaattgcctaaatcagttgttgctcttttttctcaccccggtgaactatctgcccggtcaggtgatgcacttcaaaaagcctttacagataaagaggaattacttaagcagcaggcatctaaccttcatgagcagaaaaaagctggggtgatatttgaagctgaagaagttatcactcttttaacttctgtgcttaaaacgtcatctgcatcaagaactagtttaagctcacgacatcagtttgctcctggagcgacagtattgtataagggcgataaaatggtgcttaacctggacaggtcccgtgttccaactgagtgtatagagaaaattgaggccattcttaaggaacttgaaaagccagcaccctgatgcgacctcgttttagtctacgtttatctgtctttacttaatgtcctttgttacaggccagaaagcataactggcctgaatattctctctgggcccactgttccacttgtatcgtcggtctgataatcagactgggaccacggtcccactcgtatcgtcggtctgattattagtctgggaccacggtcccactcgtatcgtcggtctgattattagtctgggaccacggtcccactcgtatcgtcggtctgataatcagactgggaccacggtcccactcgtatcgtcggtctgattattagtctgggaccatggtcccactcgtatcgtcggtctgattattagtctgggaccacggtcccactcgtatcgtcggtctgattattagtctggaaccacggtcccactcgtatcgtcggtctgattattagtctgggaccacggtcccactcgtatcgtcggtctgattattagtctgggaccacgatcccactcgtgttgtcggtctgattatcggtctgggaccacggtcccacttgtattgtcgatcagactatcagcgtgagactacgattccatcaatgcctgtcaagggcaagtattgacatgtcgtcgtaacctgtagaacggagtaacctcggtgtgcggttgtatgcctgcggtggattgctgctgtgtcctgcttatccacaacattttgcgcacggttatgtggacgggcctatacatgtgtatatatgtatacctatgaatgtcagtaagtatgtatacgaacagtatgatactgaagatgacaaggtaatgcatcattctatacgtgtcattctgaacgaggcgcgctttccttttttctttttgctttttctttttttttctcttgaactcgacggatctatgcggtgtgaaataccgcacagatgcgtataacttcgtatagcatacattatacgaagttattaatgacagaatataaaccaacagtccggctggctacacgagatgatgtacctcgcgctgtgagaacactggctgctgcttttgctgattatccggcgacaagacatactgttgaccccgatagacatattgaacgcgtgacagaattgcaggagctgtttctgactagggtgggtttagatattggtaaagtttgggtggccgatgatggagcagccgtagctgtgtggacaaccccagaatctgttgaggccggagccgtctttgctgaaattggacccagaatggcagaactgtctggctctaggctcgcggcccaacagcaaatggaaggattgctcgcacctcatcgccctaaagaacctgcctggtttctcgctacggtaggggtgtccccagatcatcaaggtaaaggcctcggatccgctgtggtcctgccaggggtcgaagctgcggaaagagcaggagttccagcatttcttgaaacatctgcacctaggaatctgcccttttatgaaaggctgggatttacagtaactgcagatgttgaagtaccagagggtccccggacatggtgtatgacgagaaaaccaggggcgggctcaggcgccaccaactttagcctgctgaagcaggcaggcgacgtcgaggagaaccccggccctatggtgagcaagggcgaggagctgttcaccggggtggtgcccatcctggtcgagctggacggcgacgtaaacggccacaagttcagcgtgtccggcgagggcgagggcgatgccacctacggcaagctgaccctgaagttcatctgcaccaccggcaagctgcccgtgccctggcccaccctcgtgaccaccttcggctacggcctgaagtgcttcgcccgctaccccgaccacatgaagcagcacgacttcttcaagtccgccatgcccgaaggctacgtccaggagcgcaccatcttcttcaaggacgacggcaactacaagacccgcgccgaggtgaagttcgagggcgacaccctggtgaaccgcatcgagctgaagggcatcgacttcaaggaggacggcaacatcctggggcacaagctggagtacaactacaacagccacaacgtctatatcatggccgacaagcagaagaacggcatcaaggtgaacttcaagatccgccacaacatcgaggacggcagcgtgcagctcgccgaccactaccagcagaacacccccatcggcgacggccccgtgctgctgcccgacaaccactacctgagctaccagtccgccctgagcaaagaccccaacgagaagcgcgatcacatggtcctgctggagttcgtgaccgccgccgggatcactctcggcatggacgagctgtacaagtgaagttcctatactctagaaagaataggaacttctaagatcataatcagccataccacatttgtagaggttttacttgctttaaaaaacctcccacacctccccctgaacctgaaacataaaatgaatgcaattgttgttgttaacttgtttattgcagcttataatggttacaaataaagcaatagcatcacaaatttcacaaataaagcatttttttcactgcattctagttgtggtttgtccaaactcatcaatgtatcttatcatgtctggagagaccataacttcgtataggatactttatacgaagttataacctggtctcagctaggaaaccagtacaaaggcaacatcctcacttgggtgaacggaaacgcagtattatggttactttttggatacgtgaaacatatcccatggtagtccttagacttgggagtctatcacccctagggcccatatctggaaatagacgccaggttgaatccgtatttggaggtacgatggaacagtctgggtgggacgtgcttcttaattaacgggtcttttgtgttggccctaataaaaaaaaactcaggggatttttgctgtctgttgggaaataaaggtttacttttgtatcttttccctgtctgtgttggatgtatcgcggggatgcgtgggagtgggggtgcgtgggagtgggggtgcgtgggagtgggggtgcgtgggagtgggggtgcgtgggagtgggggtgcgtgggagtgggggtgcgtgggagtgggggtgccatgttgggcaggctctggtgttaaccacagagccgcggcccgggctgcctgaccaccgatccccgaaagcatcctgccactggcatggagccagaaccacagtgggttgggtgtgggtgttaagtttccgcgagcgcctgcccgcccggactgacctggcctctggccgccacaaagggcggggggggttaactacactatagggcaacaaaggatgggaggggtggcggggcgggacggggcgcccaaaagggtgaagtaaaaggcagctcgttggagttttcccagtcacgactagggataacagggtaatggaggataactataacggtcctaaggtagcgaagtctgtgtgaaattgttatccgcaccgctaccaacggttctaatttgtggagtacgtgggtcattggcgtggggggttacagcgacaccggccgaccccctggcggtcttccagccggcccttagataagggggcagttggtggtcggacgggtaagtaacagagtctaactaagggtgggagggggggaaaataacgggctggtgtgctgtaacacgagcccacccgcgagtggcgtggccgaccttagcctctggggcgccccctgtcgtttgggtccccccccctctattggggagaagcaggtgtctaacctacctggaaacgcggcgtctttgttgaacgacaccggggcgccctcgacgagtgggataacgggggaggaagggagggaggagggtactgggggtgaagggggggggaagaagcgagaacaggaaaggcgacggagcccggcagaacaccgagaaaaaaaaacgcagcgcatgcgccgggccgttgtggggccccgggccggggccccttgggtccgccggggccccgggccgggccgccacgggggccggccgttggcggtaaccccgagtgttcatctcaggccccgggccgggaacccggaaaagcctccggggggcctttttcgcgtcgcgtgccggcgagcgggtccggacggggcccggaccgccgcggtcgggggcccctcgtcccgggccgtacgcggccttcgccccgtgaggggacagacgaacgaaacattccggcgacggaacgaaaaacaccccagacgggttaaagaaacagaaaccgcaacccccaccacccccgaaacggggaaaacgaaaaaacagaccagcggccggccggcgcttagggggaggatgtcgccgacgccccttggccgccccggctgcaggggggcccggagagccgcggcacccggacgcgcccggaaagtctttcgcaccaccggcgatcggcacggccgcgcccccgcttttataaaggctcagatgacgcagcaaaaacaggccacagcaccacatgggtaggtgatgtaattttattttcctcgtctgcggcctaatggatttccgggcgcggtgcccctgtctgcagagcacttaacggattgatatctcgcgggcacgcgcgcccttaatggaccggcgcggggcggggggccggatacccacacgggcggggggggggtgtcgcgggccgtctgctggcccgcggccacataaacaatgactcggggcctttctgcctctgccgcttgtgtgtgcgcgcgccggctctgcggtgtcggcggcggcggcggcggtggccgccgtgttcggtctcggtagccggccggcgggtggactcgcggggggccggagggtggaaggcaggggggtgtaggatgggtatcaggacttccacttcccgtccttccatcccccgttcccctcggttgttcctcgcctcccccaacaccccgccgctttccgttggggttgttattgttgtcgggatcgtgcgggccgggggtcgccggggcaggggcgggggcgtgggcgggggtgctcgtcgatcgaccgggctcagtgggggcgtggggtgggtgggagaaggcgaggagactggggtgggggtgtcggtgggtggttgttttttttttttgtggttgttttttgtgtctgtttccgtcccccgtcacccccctccctccgtcccctccgtccccccgtcgcgggtgtttgtgtttgtttattccgacatcggtttatttaaaataaacacagccgttctgcgtgtctgttcttgcgtgtggctgggggcttatatgtggggtcccgggggcgggatggggtttagcggcggggggcggcgcgccggacggggcgctggagataacggcccccggggaacgggggaccggggctgggtatcccgaggtgggtgggtgggcggcggtggccgggccgggccgggccgggccgggtgggcggggtttggaaaaacgaggaggaggaggagaaggcggggggggagacggggggaaagcaaggacacggcccggggggtgggagcgcgggccgggccgctcgtaagagccgcgacccggccgccggggagcgttgtcgccgtcggtctgccggcccccgtccctcccttttttgaccaaccagcgccctcccccccaccaccattcctactaccaccaccaccaccacccccaccaccgacacctcccgcgcacccccgcccacatccccccaccccgcaccacgagcacggggtgggggtagcaggggatcaaaggggggcaaagccggcggggcggttcgggggggcgggagaccgagtaggcccgcccatacgcggcccctcccggcagccacgccccccagcgttgggtgtcacggggaaagagcaggggagagggggggagaggggagagggggggagaggggagagggggggagaggggagagggggggagaggggagagggggggagaggggagagggggggagaggggagagggggggagaggggagagggggggagagggggtatataaaccaacgaaaagcgcgggaacggggatacggggcttgtgtggcacgacgtcgtggttgtgttactgggcaaacacttggggactgtaggtttctgtgggtgccgaccctaggcgctatggggattttgggttgggtcgggcttattgccgttggggttttgtgtgtgcgggggggcttgtcttcaaccgaatatgttattcggagtcgggtggctcgagaggtgggggatatattaaaggtgccttgtgtgccgctcccgtctgacgatcttgattggcgttacgagaccccctcggctataaactatgctttgatagacggtatatttttgcgttatcactgtcccggattggacacggtcttgtgggataggcatgcccagaaggcatattgggttaacccctttttatttgtggcgggttttctggaggacttgagtcaccccgcgtttcctgccaacacccaggaaacagaaacgcgcttggccctttataaagagatacgccaggcgctggacagtcgcaagcaggccgccagccacacacctgtgaaggctgggtgtgtgaactttgactattcgcgcacccgccgctgtgtagggcgacaggatttgggacctaccaacggaacgtctggacggaccccggttctgccgccggacgatgaagcgggcctgcaaccgaagcccctcaccacgccgccgcccatcatcgccacgtcggaccccaccccgcgacgggacgccgccacaaaaagcagacgccgacgaccccactcccggcgcctctaacgatgcctcgacggaaacccgtccgggttcggggggcgaaccggccgcctgtcgctcgtcagggccggcgggcgctcctcgccgccctagaggctgtcccgctggtgtgacgttttcctcgtccgcgccccccgaccctcccatggatttaacaaacgggggggtgtcgcctgcggcgacctcggcgcctctggactggaccacgtttcggcgtgtgtttctgatcgacgacgcgtggcggcccctgatggagcctgagctggcgaaccccttaaccgcccacctcctggccgaatataatcgtcggtgccagaccgaagaggtgctgccgccgcgggaggatgtgttttcgtggactcgttattgcacccccgacgaggtgcgcgtggttatcatcggccaggacccatatcaccaccccggccaggcgcacggacttgcgtttagcgtgcgcgcgaacgtgccgcctcccccgagtcttcggaatgtcttggtggccgtcaagaactgttatcccgaggcacggatgagcggccacggttgcctggaaaagtgggcgcgggacggcgtcctgttactaaacacgaccctgaccgtcaagcgcggggcggcggcgtcccactctagaatcggttgggaccgcttcgtgggcggagttatccgccggttggccgcgcgccgccccggcctggtgtttatgctctggggcgcacacgcccagaatgccatcaggccggaccctcgggtccattgcgtcctcaagttttcgcacccgtcgcccctctccaaggttccgttcggaacctgccagcatttcctcgtggcgaaccgatacctcgagacccggtcgatttcacccatcgactggtcggtttgaaaggcatcgacgtccggggtttttgtcggtgggggcttttgggtatttccgatgaataaagacggttaatggttaaacctctggtctcatacgggtcggtgatgtcgggcgtcgggggagagggagttccctctgcgcttgcgattctagcctcgtggggctggacgttcgacacgccaaaccacgagtcggggatatcgccagatacgactcccgcagattccattcggggggccgctgtggcctcacctaaccaacctttacacgggggcccggaacgggaggccacagcgccgtctttctccccaacgcgcgcggatgacggcccgccctgtaccgacgggccctacgtgacgtttgataccctgtttatggtgtcgtcgatcgacgaattagggcgtcgccagctcacggacaccatccgcaaggacctgcggttgtcgctggccaagtttagcattgcgtgcaccaagacctcctcgttttcgggaaacgccccgcgccaccacagacgcggggcgttccagcgcggcacgcgggcgccgcgcagcaacaaaagcctccagatgtttgtgttgtgcaaacgcgcccacgccgctcgagtgcgagagcagcttcgggtcgttattcagtcccgcaagccgcgcaagtattacacgcgatcttcggacgggcggctctgccccgccgtccccgtgttcgtccacgagttcgtctcgtccgagccaatgcgcctccaccgagataacgtcatgctggcctcgggggccgagtaaccgccccccccccatgccaccctcactgcccgtcgcgcgtgtttgatgttaataaataacacataaatttggctggttgtttgttgtctttaatggaccgcccgcaagggggggggggcgtttcagtgtcgggtgacgagcgcgatccggccgggatcctaggaccccaaaagtttgtctgcgtattccagggtggggctcagttgaatctcccgcagcacctctaccagcaggtccgcggtgggctggagaaactcggccgtcccggggcaggcggttgtcgggggtggaggcgcggcgcccaccccgtgtgccgcgcctggcgtctcctctgggggcgacccgtaaatggttgcagtgatgtaaatggtgtccgcggtccagaccacggtcaaaatgccggccgtggcgctccgggcgctttcgccgcgcgaggagctgacccaggagtcgaacggatacgcgtacatatgggcgtcccacccgcgttcgagcttctggttgctgtcccggcctataaagcggtaggcacaaaattcggcgcgacagtcgataatcaccaacagcccaatgggggtgtgctggataacaacgcctccgcgcggcaggcggtcctggcgctcccggccccgtaccatgatcgcgcgggtgccgtactcaaaaacatgcaccacctgcgcggcgtcgggcagtgcgctggtcagcgaggccctggcgtggcataggctatacgcgatggtcgtctgtggattggacatctcgcggtgggtagtgagtcccccgggccgggttcggtggaactgtaaggggacggcgggttaatagacaatgaccacgttcggatcgcgcagagccgatagtatgtgctcactaatgacgtcatcgcgctcgtggcgctcccggagcggatttaagttcatgcgaaggaattcggaggaggtggtgcgggacatggccacgtacgcgctgttgaggcgcaggttgccgggcgtaaagcagatggcgaccttgtccaggctaaggccctgggagcgcgtgatggtcatggcaagcttggagctgatgccgtagtcggcgtttatggccatggccagctccgtagagtcaatggactcgacaaactcgctgatgttggtgttgacgacggacatgaagccgtgttggtcccgcaagaccacgtaaggcaggggggcctcttccagtaactcggccacgttggccgtcgcgtgccgcctccgcagctcgtccgcaaaggcaaacacccgtgtgtacgtgtatcccatgagcgtataattgtccgtctgcagggcgacggacatcagccccccgcgcggcgagccggtcagcatctcgcagccccggaagataacgttgtccacgtacgtgctaaagggggcgacttcaaatgcctccccgaagagctcttggaggattcggaatctcccgaggaaggcccgcttcagcagcgcaaactgggtgtgaacggcggcggtggtctccggttccccgggggtgtagtggcagtaaaacacgtcgagctgttgttcgtccagccccgcgaaaataacgtcgaggtcgtcgtcgggaaaatcgtccgggcccccgtcccgcggccccagttgcttaaaatcaaacgcacgctcgccgggggcgcctgcgtcggccattaccgacgcctgcgtcggcacccccgaagatttggggcgcagagacagaatctccgccgttagttctcccatgcgggcgtacgcgagggtcctctgggtcgcatccaggcccgggcgctgcagaaagttgtaaaaggagataagcccgctaaatatgagccgcgacaggaacctgtaggcaaactccaccgaagtctccccctgagtctttacaaagctgtcgtcacgcaacactgcctcgaaggcccggaacgtcccactaaacccaaaaaccagttttcgcaggcgcgcggtcaccgcgatctggctgttgaggacgtaagtgacgtcgttgcgggccacgaccagctgctgtttgctgtgcacctcgcagcgcatgtgccccgcgtcctggtcctggctctgcgagtagttggtgatgcggctggcgttggccgtgagccacttttcaatagtcaggccgggctggtgtgtcagccgtcggtattcgtcaaactccttgaccgacacgaacgtaagcacggggagggtgaacacgacgaactccccctcacgggtcaccttcaggtaggcgtggagcttggccatgtacgcgctcacctctttgtgggaggagaacagccgcgtccagccggggaggttggcggggttggtgatgtagttttccgggacgacgaagcgatccacgaactgcatgtgctcctcggtgatgggcaggccgtactccagcaccttcatgaggttaccgaactcgtgctcgacgcaccgtttgttgttaataaaaatggcccagctatacgagaggcgggcgtactcgcgcagcgtgcggttgcagatgaggtacgtgagcacgttctcgctctggcggacggaacaccgcagtttctggtgctcgaaggtcgactccagggacgccgtctgcgtcggcgagcccacacacaccaacacgggccgcaggcgggccgcgtactggggggtgtggtacagggcgttaatcatccaccagcaatacaccacggccgtgaggaggtgacgcccaaggagcccggcctcgtcgatgacgatcacgttgctgcgggtaaaggccggcagcgccccgtgggtggccggggccaaccgcgtcagggcgccctcggccaaccccagggtccgttccagggcggccagggcgcgaaactcgttccgcaactcctcgcccccggaggcggccagggcgcgcttcgtgaggtccaaaatcacctcccagtagtacgtcagatctcgtcgctgcaggtcctccagcgaggcggggttgctggtcagggtgtacgggtactgtcccagttgggcctggacgtgattcccgcgaaacccaaattcatgaaagatggtgttgatgggtcggctgagaaaggcgcccgagagtttggcgtacatgttttgggccgcaatgcgcgtggcgcccgtcaccacacagtccaagacctcgttgattgtctgcacgcacgtgctctttccggagccagcgttgccggtgataagatacaccgcgaacggaaactccctgaggggcaggcctgcgggggactctaaggccgccacgtcccggaaccactgcagacggggcacttgcgctccgtcgagctgttgttgcgagagctctcggatgcgcttaaggattggctgcaccccgtgcatagacgtaaaatttaaaaaggcctcggccctccctggaacggctggtcggtccccgggttgctgaaggtgcggcgggccgggtttctgtccgtctagctggcgctccccgccggccgccgccatgaccgcaccacgctcgtgggcccccactacgcgtgcgcggggggacacggaagcgctgtgctcccccgaggacggctgggtaaaggttcaccccacccccggtacgatgctgttccgtgagattctccacgggcagctggggtataccgagggccagggggtgtacaacgtcgtccggtccagcgaggcgaccacccggcagctgcaggcggcgatctttcacgcgctcctcaacgccaccacttaccgggacctcgaggcggactggctcggccacgtggcggcccgcggtctgcagccccaacggctggttcgccggtacaggaacgcccgggaggcggatatcgccggggtggccgagcgggtgttcgacacgtggcggaacacgcttaggacgacgctgctggactttgcccacgggttggtcgcctgctttgcgccgggcggcccgagcggcccgtcaagcttccccaaatatatcgactggctgacgtgcctggggctggtccccatattacgcaagcgacaagaagggggtgtgacgcagggtctgagggcgtttctcaagcagcacccgctgacccgccagctggccacggtcgcggaggccgcggagcgcgccggccccgggttttttgagctggcgctggccttcgactccacgcgcgtggcggactacgaccgcgtgtatatctactacaaccaccgccggggcgactggctcgtgcgagaccccatcagcgggcagcgcggagaatgtctggtgctgtggccccccttgtggaccggggaccgtctggtcttcgattcgcccgtccagcggctgtttcccgagatcgtcgcgtgtcactccctccgggaacacgcgcacgtctgccggctgcgcaataccgcgtccgtcaaggtgctgctggggcgcaagagcgacagcgagcgcggggtggccggtgccgcgcgggtcgttaacaaggtgttgggggaggacgacgagaccaaggccgggtcggccgcctcgcgcctcgtgcggcttatcatcaacatgaagggcatgcgccacgtaggcgacattaacgacaccgtgcgtgcctacctcgacgaggccggggggcacctgatagacgccccggccgtcgacggtaccctccctggattcggcaagggcggaaacagccgcgggtctgcgggccaggaccagggggggcgggcgccgcagcttcgccaggccttccgcacggccgtggttaacaacatcaacggcgtgttggagggctatataaataacctgtttggaaccatcgagcgcctgcgcgagaccaacgcgggcctggcgacccaattgcaggagcgcgaccgcgagctccggcgcgcaacagcgggggccctggagcgccagcagcgcgcggccgacctggcggccgagtccgtgaccggtggatgcggcagccgccctgcgggggcggacctgctccgggccgactatgacattatcgacgtcagcaagtccatggacgacgacacgtacgtcgccaacagctttcagcacccgtacatcccttcgtacgcccaggacctggagcgcctgtcgcgcctctgggagcacgagctggtgcgctgttttaaaattctgtgtcaccgcaacaaccagggccaagagacgtcgatctcgtactccagcggggcgatcgccgcattcgtcgccccctactttgagtcagtgcttcgggccccccgggtaggcgcgcccatcacgggctccgatgtcatcctgggggaggaggagttatgggatgcggtgtttaagaaaacccgcctgcaaacgtacctgacagacatcgcggccctgttcgtcgcggacgtccagcacgcagcgctgcccccgcccccctccccggtcggcgccgatttccggcccggcgcgtccccgcggggccggtccagatcgcggtcgcccggaagaactgcgccaggcgcgccggaccagggcgggggcatcgggcaccgggatggccgccgcgacggccgacgatgaggggtcggccgccaccatcctcaagcaggccatcgccggggaccgcagcctggtcgaggcggccgaggcgattagccagcagacgctgctccgcctggcctgcgaggtgcgccaggtcggcgaccgccagccgcggtttaccgccaccagcatcgcgcgcgtcgacgtcgcgcctgggtgccggttgcggttcgttctggacgggagtcccgaggacgcctatgtgacgtcggaggattactttaagcgctgctgcggccagtccagttatcgcggcttcgcggtggcggtcctgacggccaacgaggaccacgtgcacagcctggccgtgccccccctcgttctgctgcaccggttctccctgttcaaccccagggacctcctggactttgagcttgcctgtctgctgatgtacctggagaactgcccccgaagccacgccaccccgtcgacctttgccaaggttctggcgtggctcggggtcgcgggtcgccgcacgtccccattcgaacgcgttcgctgccttttcctccgcagttgccactgggtcctaaacacactcatgttcatggtgcacgtaaaaccgttcgacgacgagttcgtcctgccccactggtacatggcccggtacctgctggccaacaacccgccccccgttctctcggccctgttctgtgccaccccgacgagctcctcattccggctgccggggccgcccccccgctccgactgcgtggcctataaccccgccgggatcatggggagctgctgggcgtcggaggaggtgcgcgcgcctctggtctattggtggctttcggagaccccaaaacgacagacgtcgtcgctgttttatcagttttgttgaattttaggaaataaacccggttttgtttctgtggcctcccgacggatgcgcgtgtccttcctccgtcttggtgggtgggtgtctgtgtatcgcgtcccatctgtgcggagagggggggcatgtcggcacgtattcggacagactcaagcacacacgggggagcgctcttgtctcagggcaatgtttttattggtcaaactcaggcaaacagaaacgacatcttgtcgtcaaagggatacacaaacttccccccctctccccatactcccgccagcaccccggtaaacaccaactcaatctcgcgcaggatttcgcgcaggtgatgagcgcagtccacgggggggagcacaaggggccgcgggtatagatcgacggggacgccgaccgactccccgcctccgggacagacacgcacgacgcgccgccagtagtgctctgcgtccagcaaggcgccgccgcggaaggcagtggggggcaaggggtcgctagcctcaaagggggacacccgaacgctccagtactccgcgtccaaccgtttattaaacgcgtccacgataaggcggtcgcaggcgtcctccataaggccccgggccgtgagtgcgtcctcctccggcacgcctgccgttgtcaggcccaggacccgtcgcagcgtgtcgcgtacgaccccggccgccgtggtgtacgcgggcccgcggagaggaaatcccccaagatggtcagtgttgtcgcgggagttccagaaccacactcccgcctggttccaggcgactgcgtgggtgtagacgccctcgagggccaggcacagtgggtgccgcagccggaggccgttggccctaagcacggctcccacggccgtctcgatggcccgccgggcgtcctcgatcaccccggaagccgcatccgcgtcttgggggtccacgttaaagacaccccagaacgcacccccatcgcccccgcagaccgcgaacttcaccgagctggccgtctcctcgatctgcaggcagacggcggccattaccccacccaggagctgccgcagcgcagggcaggcgtcgcacgtgtccgggaccaggcgctccaagacggccccggcccagggctctgagggagcggccaccaccagcgcgtccagtcttgctaggcccgtccggccgtgggggtccgccagcccgctccccccgaggtcggccagggccgccaggagctgggcgcgaagtccggggaagcaaaaccgcgccgtccagacgggcccgacggccgcgggcgggtctaacagttggatgattttagtggcgggatgccaccgcgccaccgcctcccgcaccgcgggcaggaggcatccggctgccgccgaggccacgccgggccaggctcgcggggggaggacgaccctggcccccaccgcgggccaggcccccaggagcgcggcgtaagcggccgcggccccgcgcaccaggtcccgtgccgactcggccgtggccggcacggtgaacgtgggccaacccggaaaccccaggacggcaaagtacgggacgggtcccccccggacctcaaactcgggccccagaaaggcaaagacgggggccagggccccgggggcggcgtggaccgtggtatgccactgccggaaaagggcgacgagcgccggcgcggagaacttctcgccggcgcttacaaagtagtcgtaatcgcggggcagcagcacccgtgccgtgactcgttgcgggtgcccgcgtggccgcaggcccacctcgcacacctcgaccaggtccccgaacgcgccctccttcttgatcggcggaaacgcaagagtctggtattcgcgcgcaaatagcgcggttccggtggtgatgttaacggtcagcgaagcggcggacgcgcactggggggtgtcgcgaatggccgccaggcgcgcccacgccagccgcgcgtcgggatgctcggcaacgcgcgccgccagggccatagggtcgatgtcaatgttggcctccgcgaccaggagagcggcgcgaggggcggcgggcgggccccacgacgctctctcaactttcaccaccagtcccgtgcgtgggtccgagccgatacgcagcggggcgaacagggccaccggcccggtctggcgctccagggccgccaggacgcacgcgtacagcgcccgccacagagtcgggttctccaggggctccagcggggaggcggccggcgtcgtcgcggcgcgggcggccgccacgacggcctggacggagacgtccgcggagccgtagaaatcccgcagctccgtcgcggtgacggagacctccgcaaagcgcgcgcgaccctcccctgcggcgttgcgacatacaaaatacaccagggcgtggaagtactcgcgagcgcgggggggcagccataccgcgtaaagggtaatggcgctgacgctctcctccacccacacgatatctgcggtgtccatcgcacggcccctaaggatcacgggcggtctgtgggtcccatgctgccgtgcctggccgggcccggtgggtcgcggaaaccggtgacggggggggggcggtttttggggttggggtgggggtgggaaacggcccgggtccgggggccaacttggcccctcggtgcgttccggcaacagcgccgccggtccgcggacgaccacgtaccgaacgagtgcggtcccgagac

SEQ ID NO: 11 - DNA, 130088 bp, synthetic construct
  source 1..130088: mol_type = other DNA
cagaccccaataaacgtatgtcgctaccacacccttgtgtgtcaatggacgcctctccgggggggaagggaaaacaaagaggggctgggggagcggcaccaccggggcctgaacaaacaaaccacagacacggttacagtttattcggtcgggcggagaaacggccgaagccacgccccctttattcgcgtctccaaaaaaacgggacacttgtccggagaacctttaggatgccagccagggcggcggtaatcataaccacgcccagcgcagaggcggccagaaacccgggcgcaattgcggccacgggctgcgtgtcaaaggctagcaaatgaatgacggttccgtttggaaatagcaacaaggccgtggacggcacgtcgctcgaaaacacgcttggggcgccctccgtcggcccggcggcgatttgctgctgtgtgttgtccgtatccaccagcaacacagacatgacctccccggccggggtgtagcgcataaacacggcccccacgagccccaggtcgcgctggttttgggtgcgcaccagccgcttggactcgatatcccgggtggagccttcgcatgtcgcggtgaggtaggttaggaacagtgggcgtcggacgtcgacgccggtgagcttgtagccgatcccccggggcagaggggagtgggtgacgacgtagctggcgttgtgggtgatgggtaccaggatccgtggctcgacgttggcagactgccccccgcaccgatgtgaggcctcagggacgaaggcgcggatcagggcgttgtagtgtgcccagcgcgtcagggtcgaggcgaggccgtgggtctgctgggccaggacttcgaccggggtctcggatcgggtggcttgagccagcgcgtccaggataaacacgctctcgtctagatcaaagcgcagggaggccgcgcatggcgaaaagtggtccggaagccaaaagagggttttctggtggtcggcccgggccagcgcggtccggaggtcggcgttggtcgctgcggcgacgtcggacgtacacagggccgaggctatcagaaggctccggcgggcgcgttcccgctgcaccgccgaggggacgcccgccaagaacggctgccggaggacagccgaggcgtaaaatagcgcccggtggacgaccggggtggtcagcacgcggccccctagaaactcggcatacagggcgtcgatgagatgggctgcgctgggcgccactgcgtcgtacgccgaggggctatccagcacgaaggccagctgatagcccagcgcgtgtaatgccaagctctgttcgcgctccagaatctcggccaccaggtgctggagccgagcctctagctgcaggcgggccgtgggatccaagactgacacattaaaaaacacagaatccgcggcacagcccgcggccccgcgggcggccaacccggcaagcgcgcgcgagtgggccaaaaagcctagcaggtcggagaggcagaccgcgccgtttgcgtgggcggcgttcacgaaagcaaaacccgacgtcgcgagcagccccgttaggcgccagaagagagggggacgcgggccctgctcggcgcccgcgtcccccgagaaaaactccgcgtatgcccgcgacaggaactgggcgtagttcgtgccctcctccgggtagccgcccacgcggcggagggcgtccagcgcggagccgttgtcggcccgcgtcagggaccctaggacaaagacccgataccgggggccgcccgggggcccgggaagagcccccggggggttttcgtccgcggggtccccgacccgatctagcgtctggcccgcggggaccaccatcacttccaccggagggctgtcgtgcatggatatcacgagccccatgaattcccgcccgtagcgcgcgcgcaccagcgcggcatcgcacccgagcaccagctcccccgtcgtccagatgcccacgggccacgtcgaggccgacggggagaaatacacgtacctacctggggatctcaacaggccccgggtggccaaccaggtcgtggacgcgttgtgcaggtgcgtgatgtccagctccgtcgtcgggtgccgccgggccccaaccggcggtcgggggggcggtgtatcacgcggcccgctcgggtggctcgccgtcgccacgttgtctccccgcgggaacgtcagggcctcggggtcagggacggccgaaaacgttacccaggcccgggaacgcagcaacacggaggcggttggattgtgcaagagacccttaaggggggcgaccgcggggggaggctgggcggtcggctcgaccgtgatgggggcgggcaggctcgcgttcgggggccggccgagcaggtaggtcttcgagatgtaaagcagctggccggggtcccgcggaaactcggccgtggtgaccaatacaaaacaaaagcgctcctcgtaccagcgaagaaggggcagagatgccgtagtcaggtttagttcgtccggcggcgccagaaatccgcgcggtggtttttgggggtcgggggtgtttggcagccacagacgcccggtgttcgtgtcgcgccagtacatgcggtccatgcccaggccatccaaaaaccatgggtctgtctgctcagtccagtcgtggacctgaccccacgcaacgcccaaaagaataacccccacgaaccataaaccattccccatgggggaccccgtccctaacccacggggcccgtggctatggcagggcttgccgccccgacgttggctgcgagccctgggccttcacccgaacttgggggttggggtggggaaaaggaagaaacgcgggcgtattggccccaatggggtctcggtggggtatcgacagagtgccagccctgggaccgaaccccgcgtttatgaacaaacgacccaacacccgtgcgttttattctgtctttttatttccgtcatagcgcgggttccttccggtattgtctccttccgtgtttcagttagcctcccccatctcccgggcaaacgtgcgcgccaggtcgcagatcgtcggtatggagcctggggtggtgacgtgggtctggaccatcccggaggtaagttgcagcagggcgtcccggcagccggcgggcgattggtcgtaatccaggataaagacgtgcatgggacggaggcgtttggccaagacgtccaaggcccaggcaaacacgttatacaggtcgccgttgggggccagcaactcgggggcccgaaacagggtaaataacgtgtccccgatatggggtcgtgggcccgcgttgctctggggctcggcaccctggggcggcacggccgtccccgaaagctgtccccaatcctcccgccacgacccgccgccctgcagataccgcaccgtattggcaagcagcccgtaaacgcggcgaatcgcggccaacatagccaggtcaagccgctcgccggggcgctggcgtttggccaggcggtcgatgtgtctgtcctccggaagggcccccaacacgatgtttgtgccgggcaaggtcggcgggatgagggccacgaacgccagcacggcctggggggtcatgctgcccataaggtatcgcgcggccgggtagcacaggagggcggcgatgggatggcggtcgaagatgagggtgagggccgggggcggggcatgtgagctcccagcctcccccccgatatgaggagccagaacggcgtcggtcacggcataaggcatgcccattgttatctgggcgcttgtcattaccaccgccgcgtccccggccgatatctcaccctggtcgaggcggtgttgtgtggtgtagatgttcgcgattgtctcggaagcccccagcacctgccagtaagtcatcggctcgggtacgtagacgatatcgtcgcgcgaacccagggccaccagcagttgcgtggtggtggttttccccatcccgtgaggaccgtctatataaacccgcagtagcgtgggcattttctgctccaggcggacttccgtggcttcttgctgccggcgagggcgcaacgccgtacgtcggttgctatggccgcgagaacgcgcagcctggtcgaacgcagacgcgtgttgatggcaggggtacgaagccatacgcgcttctacaaggcgcttgccaaagaggtgcgggagtttcacgccaccaagatctgcggcacgctgttgacgctgttaagcgggtcgctgcagggtcgctcggtgttcgaggccacacgcgtcaccttaatatgcgaagtggacctgggaccgcgccgccccgactgcatctgcgtgttcgaattcgccaatgacaagacgctgggcggggtttgtgtcatcatagaactaaagacatgcaaatatatttcttccggggacaccgccagcaaacgcgagcaacgggccacggggatgaagcagctgcgccactccctgaagctcctgcagtccctcgcgcctccgggtgacaagatagtgtacctgtgccccgtcctggtgtttgtcgcccaacggacgctccgcgtcagccgcgtgacccggctcgtcccgcagaaggtctccggtaatatcaccgcagtcgtgcggatgctccagagcctgtccacgtatacggtccccatggagcctaggacccagcgagcccgtcgccgccgcggcggcgctgcccgggggtctgcgagcagaccgaaaaggtcacactctggggcgcgcgacccgcccgagccagcggcccgccaggtaccacccgccgaccaaacccccgcctccacggagggcgggggggtgcttaagaggatcgcggcgctcttctgcgtgcccgtggccaccaagaccaaaccccgagctgcctccgaatgagagtgtttcgttccttccccctccccccgcgtcagacaaaccctaaccaccgcttaagcggcccccgcgaggtccgaagactcatttggatccggcgggagccacctgacaacagcccccgggtttccccacgccagacgccggtccgctgtgccatcgctccccttcatcccaccccccatcttgtccccaaataaaacaaggtctggtagttaggacaacgaccgcagttctcgtgtgttattgtcgctctccgcctctcgcagatggacccgtattgcccatttgacgctctggacgtctgggaacacaggcgcttcatagtcgccgattcccgaaacttcatcacccccgagttcccccgggacttttggatgtcgcccgtctttaacctcccccgggagacggcggcggagcaggtggtcgtcctgcaggcccagcgcacagcggctgccgctgccctggagaacgccgccatgcaggcggccgagctccccgtcgatatcgagcgccggttacgcccgatcgaacggaacgtgcacgagatcgcaggcgccctggaggcgctggagacggcggcggccgccgccgaagaggcggatgccgcgcgcggggatgagccggcgggtgggggcgacgggggggcgcccccgggtctggccgtcgcggagatggaggtccagatcgtgcgcaacgacccgccgctacgatacgacaccaacctccccgtggatctgctacatatggtgtacgcgggccgcggggcgaccggctcgtcgggggtggtgttcgggacctggtaccgcactatccaggaccgcaccatcacggactttcccctgaccacccgcagtgccgactttcgggacggccggatgtccaagaccttcatgacggcgctggtcctgtccctgcagtcgtgcggccggctgtatgtgggccagcgccactattccgccttcgagtgcgccgtgttgtgtctctacctgctgtaccgaaacacgcacggggccgccgacgatagcgaccgcgctccggtcacgttcggggatctgctgggccggctgccccgctacctggcgtgcctggccgcggtgatcgggaccgagggcggccggccacagtaccgctaccgcgacgacaagctccccaagacgcagttcgcggccggcgggggccgctacgaacacggagcgctggcgtcgcacatcgtgatcgccacgctgatgcaccacggggtgctcccggcggccccgggggacgtcccccgggacgcgagcacccacgttaaccccgacggcgtggcgcaccacgacgacataaaccgcgccgccgccgcgttcctcagccggggccacaacctattcctgtgggaggaccagactctgctgcgggcaaccgcgaacaccataacggccctgggcgttatccagcggctcctcgcgaacggcaacgtgtacgcggaccgcctcaacaaccgcctgcagctgggcatgctgatccccggagccgtcccttcggaggccatcgcccgtggggcctccgggtccgactcgggggccatcaagagcggagacaacaatctggaggcgctatgtgccaattacgtgcttccgctgtaccgggccgacccggcggtcgagctgacccagctgtttcccggcctggccgccctgtgtcttgacgcccaggcggggcggccggtcgggtcgacgcggcgggtggtggatatgtcatcgggggcccgccaggcggcgctggtgcgcctcaccgccctggaactcatcaaccgcacccgcacaaaccccacccccgtgggggaggttatccacgcccacgacgccctggcgatccaatacgaacaggggcttggcctgctggcgcagcaggcacgcattggcttgggctccaacaccaagcgtttctccgcgttcaacgttagcagcgactacgacatgttgtactttttatgtctggggttcattccacagtacctgtcggcggtttagtgggtggtgggcgaggggggagggggcattagggagaaagaacaagagcctccgttgggttttctttgtgcctgtactcaaaaggtcataccccgtaaacggcgggctccagtcccggcccggcggttggcgtgaacgcaacggcgggagctgggttagcgtttagtttagcattcgctctcgcctttccgcccgcccccgaccgttgagcctttttttttttcgtccaccaaagtctctgtgggtgcgcgcatggcagccgatgccccgggagaccggatggaggagcccctgccagacagggccgtgcccatttacgtggctgggtttttggccctgtatgacagcggggactcgggcgagttggcattggatccggatacggtgcgggcggccctgcctccggataacccactcccgattaacgtggaccaccgcgctggctgcgaggtggggcgggtgctggccgtggtcgacgacccccgcgggccgttttttgtgggactgatcgcctgcgtgcaactggagcgcgtcctcgagacggccgccagcgctgcgattttcgagcgccgcgggccgccgctctcccgggaggagcgcctgttgtacctgatcaccaactacctgccctcggtctccctggccacaaaacgcctggggggcgaggcgcaccccgatcgcacgctgttcgcgcacgtagcgctgtgcgcgatcgggcggcgccttggcactatcgtcacctacgacaccggtctcgacgccgccatcgcgccctttcgccacctgtcgccggcgtctcgcgagggggcgcggcgactggccgccgaggccgagctcgcgctatccggacgcacctgggcgcccggcgtggaggcgctgacccacacgctgctttccaccgccgttaacaacatgatgctgcgggaccgctggagcctggtggccgagcggcggcggcaggccgggatcgccggacacacctacctccaggcgagcgaaaaattcaaaatgtggggggcggagcctgtttccgcgccggcgcgcgggtataagaacggggccccggagtccacggacataccgcccggctcgatcgctgccgcgccgcagggtgaccggtgcccaatcgtccgtcagcgcggggtcgcctcgcccccggtactgccccccatgaaccccgttccaacatcgggcaccccggcccccgcgccgcccggcgacgggagctacctgtggatcccggcctcccattacaaccagctcgtcgccggccacgccgcgccccaaccccagccgcattccgcgtttggtttcccggctgcggcgggggccgtggcctatgggcctcacggcgcgggtctttcccagcattaccctccccacgtcgcccatcagtatcccggggtgctgttctcgggacccagcccactcgaggcgcagatagccgcgttggtgggggccatagccgcggaccgccaggcgggcggtcagccggccgcgggagaccctggggtccgggggtcgggaaagcgtcgccggtacgaggcggggccgtcggagtcctactgcgaccaggacgaaccggacgcggactacccgtactaccccggggaggctcgaggcgggccgcgcggggtcgactctcggcgcgcggcccgccagtctcccgggaccaacgagaccatcacggcgctgatgggggcggtgacgtctctgcagcaggaactggcgcacatgcgggctcggaccagcgccccctatggaatgtacacgccggtggcgcactatcgccctcaggtgggggagccggaaccaacaacgacccacccggccctttgtcccccggaggccgtgtatcgccccccaccacacagcgccccctacggtcctccccagggtccggcgtcccatgcccccactcccccgtatgccccagctgcctgcccgccaggcccgccaccgcccccatgtccttccacccagacgcgcgcccctctaccgacggagcccgcgttcccccccgccgccaccggatcccaaccggaggcatccaacgcggaggccggggcccttgtcaacgccagcagcgcagcacacgtggacgttgacacggcccgcgccgccgatttgttcgtctctcagatgatgggggcccgctgattcgccccggtctttggtaccatgggatgtcttactgtatatctttttaaataaaccaggtaataccaaataagacccattggtgtatgttctttttttattgggaggggcgggtaggcgggtagctttacaatgcaaaagcctttgacgtggaggaaggcgtgggggggaggaaatcggcactgaccaagggggtccgttttgtcacgggaaaggaaagaggaaacaggccgcggacacccgggggagtttgtgttcctttttctttcttcccacacacacaaaaggcgtaccaaacaaaaaaaccaaaagatgcgcatgcggtttaacacccgtggtttttatttacaacaaaccccccgtcacaggtcgtcctcgtcggcgtcaccgtctttgttgggaacttgggtgtagttggtgttgcggcgcttgcgcatgaccatgtcggtgaccttggcgctgagcagcgcgctcgtgcccttcttcttggccttgtgttccgtgcgctccatggccgacaccagggccatgtaccgtatcatctccctggcctcggctagcttggcctcgtcaaagtcgccgccctcctcgccctccccggacgcgtccgggttggtggggttcttgagctccttggtggttagagggtacagggccttcatggggttgctctgcagccgcatgacgtaacgaaaggcgaagaaggccgccgccaggccggccaggaccaacagacccacggccagcgccccaaaggggttggacatgaaggaggacacgcccgacacggccgataccacgccgcccacgatgcccatcaccaccttgccgaccgcgcgccccaggtcgcccatcccctcgaagaacgcgcccaggcccgcgaacatggcggcgttggcgtcggcgtggatgaccgtgtcgatgtcggcgaagcgcaggtcgtgcagctggttgcggcgctggacctccgtgtagtccagcaggccgctgtccttgatctcgtggcgggtgtacacctccagggggacaaactcgtgatcctccagcatggtgatgttgaggtcgatgaaggtgctgacggtggtgatgtcggcgcggctcagctggtgggagtacgcgtactcctcgaagtacacgtagcccccaccgaaggtgaagtagcgccggtgtcccacggtgcacggctcgatcgcatcgcgcgtcagccgcagctcgttgttctcccccagctgcccctcgaccaacgggccctggtcttcgtaccgaaagctgaccagggggcggctgtagcaggccccgggccgcgagctgatgcgcatcgagttttggacgatcacgttgtccgcggcgaccggcacgcacgtggagacggccatcacgtcgccgagcatccgcgcgctcacccgccggcccacggtgaccgaggcgatgatgttggggttcagcttgcgggcctcgttccacagggtcagctcgtgattctgtagctcgcaccacgcgatggcaacgcggcccaacatatcgttgacatggcgctgtatgtggttgtacgtaaactgcagccgggcgaactcgatggaggaggtggtcttgatgcgctccacggacgcgttggcgctggccccgggcggcgggggcgtggggtttgggggcttgcggctctgctctcggaggtgttcccgcacgtacagctccgcgagcgtgttgctgagaaggggctggtacgcgatcagaaagcccccattggccaggtagtactgcggctggcccaccttgatgtgcgtcgcgttgtacctgcgggcgaagatgcggtccatggcgtcgcgggcgtccttgccgatgcagtcccccaggtccacgcgcgagagcgggtactcggtcaggttggtggtgaaggtggtggatatggcgtcggaggagaatcggaaggagccgccgtactcggagcgcagcatctcgtccacttcctgccacttggtcatggtgcagaccgacgggcgctttggcacccagtcccaggccacggtgaacttgggggtcgtgagcaggttccgggtggtcggcgccgtggcccgggccttggtggtgaggtcgcgcgcgtagaagccgtcgacctgcttgaagcggtcggcggtgtagctggtgtgttcggtgtgcgacccctcccggtagccgtaaaacggggacatgtacacaaagtcgccagtcgccagcacaaactcgttgtacgggtacaccgagcgcgcgtccacctcctcgacgatgcagtttaccgtcgtcccgtaccggtggaacgcctccacccgcgaggggttgtacttgaggtcggtggtgtgccagccccggctcgtgcgggtcgcggcgttggccggtttcagctccatgtcggtctcgtggtcgtcccggtgaaacgcggtggtctccaggttgttgcgcacgtacttggccgtggaccgacagacccccttggcgttgatcttgtcgatcacctcctcgaaggggacgggggcgcggtcctcaaagatccccataaactgggagtagcggtggccgaaccacacctgcgaaacggtgacgtctttgtagtacatggtggccttgaacttgtacggggcgatgttctccttgaagaccaccgcgatgccctccgtgtagttctgaccctcgggccgggtcgggcagcggcgcggctgctcgaactgcaccaccgtggcgcccgtggggggtgggcacacgtaaaagtttgcatcggtgttctccgccttgatgtcccgcaggtgctcgcgcagggtggcgtggcccgcggcgacggtcgcgttgtcgccggcggggcgtggtggcgttgggtttttcggttttttgttcttcttcggtttcgggtcccccgttggggcggcgccaagggcgggcggcgccggagtggcagggcccccgttcgccgcctgggtcgcggccgcgaccccaggcgtgccgggggaactcggagccgccgacgccaccaggacccccagcgtcaaccccaagagcgcccatacgacgaaccaccggcgcccccacgagggggcgccctggtgcatggcgggactacgggggcccgtcgtgccccccgtcaggtagcctgggggcgaggtgctggaggaccgagtagaggatcgagaaaacgtcgcggtcgtagaccacgaccgaccgggggccgatacagccgtcgggggcgctctcgacgatggccaccagcggacagtcggagtcgtacgtgagatatacgccgggcgggtaacggtaacgaccttcggaggtcgggcggctgcagtccgggcggcgcaactcgagctccccgcaccggtagaccgaggcaaagagtgtggtggcgataatcagctcgcgaatatatcgccaggcggcgcgctgagtgggcgttattccggaaatgccgtcaaaacagtaaaacctctgaaattcgctgacggcccaatcagcacccgagccccccgcccccatgatgaaccgggcgagctcctccttcaggtgcggcaggagccccacgttctcgacgctgtaatacagcgcggtgttggggggctgggcgaagctgtgggtggagtgatcaaagaggggcccgttgacgagctcgaagaagcgatgggtgatgctggggagcagggccgggtccacctggtgtcgcaggagagacgctcgcatgaaccggtgcgcgtcgaacacgcccggcgccgagcggttgtcgatgaccgtgcccgcgcccgccgtcagggcgcagaagcgcgcgcgcgccgcaaagccgttggcgaccgcggcgaacgtcgcgggcagcacctcgccgtggacgctgacccgcagcatcttctcgagctccccgcgctgctcgcggacgcagcgccccaggctggccaacgaccgcttcgtcaggcggtccgcgtacagccgccgtcgctcccgtacgtccgcggccgcttgcgtggcgatgtccccccacgtctcgggcccctgccccccgggcccgcggcgacggtcttcgtcctcgcccccgcccccgggagctcccaacccccgtgccccttcctctacagcgacacggtccccgtcgtcgtcggggcccgcgccgcccttgggcgcgtccgccgcgccccccgcccccatgcgcgccagcacgcgacgcagcgcctcctcgtcgcactgttcggggctgacgaggcgccgcaagagcggcgtcgtcaggtggtggtcgtagcacgcgcggatgagcgcctcgatctgatcgtcgggtgacgtggcctgaccgccgattattagggcgtccaccatatccagcgccgccaggtggctcccgaacgcgcgatcgaaatgctccgcccgccgcccgaacagcgccagttccacggccaccgcggcggtctcctgctgcaactcgcgccgcgccagcgcggtcaggttgctggcaaacgcgtccatggtggtctggccggcgcggtcgccggacgcgagccagaatcgcaattcgctgatggcgtacaggccgggcgtggtggcctgaaacacgtcgtgcgcctccagcagggcgtcggcctccttgcggaccgagtcgttctcgggcgacgggtggggctgcccgtcgccccccgcggtccgggccagcgcatggtccaacacggagagcgcccgcgcgcggtcggcgtccgacagcccggcggcgtggggcaggtaccgccgcagctcgttggcgtccagccgcacctgcgcctgctgggtgacgtggttacagatacggtccgccaggcggcgggcgatcgtcgccccctggttcgccgtcacacacagttcctcgaaacagaccgcgcaggggtgggacgggtcgctaagctccggggggacgataaggcccgaccccaccgcccccaccataaactcccgaacgcgctccagcgcggcggtggcgccgcgcgagggggtgatgaggtggcagtagtttagctgctttagaaagttctcgacgtcgtgcaggaaacacagctccatatggacggtcccgccatacgtatccagcctgacccgttggtgatacggacagggtcgggccaggcccatggtctcggtgaaaaacgccgcgacgtctcccgcggtcgcgaacgtctccaggctgcccaggagccgctcgccctcgcgccacgcgtactctagcagcaactccagggtgaccgacagcggggtgagaaaggccccggcctgggcctccaggcccggcctcagacgacgccgcagcgcccgcacctgaagcgcgttcagcttcagttgggggagcttcccccgtccgatgtgggggtcgcaccgccggagcagctctatctgaaacacataggtctgcacctgcccgagcagggctaacaacttttgacgggccacggtgggctcggacaccggggcggccatctcgcggcgccgatctgtaccgcggccggagtatgcggtggaccgaggcggtccgtacgctacccggtgtctggctgagccccggggtccccctcttcggggcggcctcccgcgggcccgccgaccggcaagccgggagtcggcggcgcgtgcgtttctgttctattcccagacaccgcggagaggaatcacggcccgcccagagatatagacacggaacacaaacaagcacggatgtcgtagcaataatttattttacacacattccccgccccgccctaggttcccccaccccccaacccctcacagcatatccaacgtcaggtctccctttttgtcggggggcccctccccaaacgggtcatccccgtggaacgcccgtttgcggccggcaaatgccggtcccggggcccccgggccgccgaacggcgtcgcgttgtcgtcctcgcagccaaaatccccaaagttaaacacctccccggcgttgccgagttggctgactagggcctcggcctcgtgcgccacctccagggccgcgtccgtcgaccactcgccgttgccgcgctccagggcacgcgcggtcagctccatcatctcctcgcttaggtactcgtcctccaggagcgccagccagtcctcgatctgcagctgctgggtgcggggccccaggcttttcacggtcgccacgaacacgctactggcgacggccgccccgccctcggagataatgccccggagctgctcgcacagcgagctttcgtgcgctccgccgccgaggttcgaggccgcgcacacaaacccggcccggggacaggccaggacgaacttgcgggtgcggtcaaaaataaggagcgggcacgcgtttttgccgcccatcaggctggcccagttcccggcctgaaacacacggtcgttgccggccatgccgtagtatttgctgatgctcaaccccaacacgaccatggggcgcgccgccatgacgggccgcagcaggttgcagctggcgaacatggacgtccacgcgcccggatgcgcgtccacggcgtccatcagcgcgcgggccccggcctccaggcccgccccgccctgcgcggaccacgcggccgccgcctgcacgctggggggacggcgggaccccgcgatgatggccgtgagggtgttgatgaagtatgtcgagtgatcgcagtaccgcagaatctggtttgccatgtagtacatcgccagctcgctcacgttgttgggggccaggttaataaagtttatcgcgccgtagtccagggaaaactttttaatgaacgcgatggtctcgatgtcctcgcgcgacaggagccgggcgggaagctggttgcgttggagggccgtccagaaccactgcgggttcggctggttggaccccgggggcttgccgttggggaagatggccgcgtggaactgcttcagcagaaagcccagcggtccgaggaggatgtccacgcgcttgtcgggcttctggtaggcgctctggaggctggcgacccgcgccttggcggcctcggacgcgttggcgctcgcgcccgcgaacaacacgcggctcttgacgcgcagctccttgggaaaccccagggtcacgcgggcaacgtcgccctcgaagctgctctcggcgggggccgtctggccggccgttaggctgggggcgcagatagccgccccctccgagagcgcgaccgtcagcgttttggccgacagaaacccgttgttaaacatgtccatcacgcgccgccgcagcaccggttggaattgattgcgaaagttgcgcccctcgaccgactgcccggcgaacaccccgtggcactggctcagggccaggtcctgatacacggcgaggttggatcgccgcccgagaagctgaagcagggggcatggcccgcacgcgtacgggtccagcgtcagggacatggcgtggttggcctcgcccagaccgtcgcgaaacttgaagttcctcccctccaccaggttgcgcatcagctgctccacctcgcggtccacgacctgcctgacgttgttcaccaccgtatgcagggcctcgcggttggtgatgatggtctccagccgccccatggccgtggggaccgcctggtccacgtactgcagggtctcgagttcggccatgacgcgctcggtcgccgcgcggtacgtctcctgcatgatggtccgggcggtctcggatccgtccgcgcgcttcagggccgagaaggcggcgtagtttcccagcacgtcgcagtcgctgtacatgctgttcatggtcccgaagacgccgatggctccgcgggcggcgctggcgaacttgggatggcgcgcccggaggcgcatgagcgtcgtgtgtacgcaggcgtggcgcgtgtcgaaggtgcacaggttgcagggcacgtcggtctggttggagtccgcgacgtatcgaaacacgtccatctcctggcgcccgacgatcacgccgccgtcgcagcgctccaggtaaaacagcatcttggccagcagcgccggggaaaacccacacagcatggccaggtgctcgccggcaaattcctgggttccgccgacgaggggcgcggtgggccgaccctcgaacccgggcaccacgtgtccctcgcggtccacctgtgggttggccgccacgtgggtcccgggcacgaggaagaagcggtaaaaggagggtttgctgtggtcctttgggtccgccggaccggcgtcgtccacctcggtgagatggagggccgagttggtgctaaataccatggcccccacgagtcccgcggcgcgcgccaggtacgccccgacggcgttggcgcgggccgcggccgtgtcctggccctcgcacagcggccacgcggagatgtcggtgggcggctcgtcgaagacggccatcgacacgatagactcgagggccagggcggcgtctccggccatgacggaggccaggcgctgttcgaacccgcccgccgggcccttgccgccgccgtcgcgcccaccccgcggggtcttaccctggctggcttcgaaggccgtgaacgtaatgtcggcggggagggcggcgccctcgtggttttcgtcaaacgccaggtgggcggccgcgcgggccacggcgtccacgtttcggcatcgcagtgccacggcggcgggtcccacgaccgcctcgaacaggaggcggttgagggggcggttaaaaaacggaagcgggtaggtaaaattctccccgatcgatcggtggttggcgttgaacggctcggcgatgacccggctaaaatccggcatgaacagctgcaacggatacacgggtatgcggtgcacctccgccccgcctatggttaccttgtccgagcctcccaggtgcagaaaggtgttgttgatgcacacggcctccttgaagccctcggtaacgaccagatacaggagggcgcggtccgggtccaggccgaggcgctcacacagcgcctcccccgtcgtctcgtgtttgaggtcgccgggccggggggtgtagtccgaaaagccaaaatggcggcgtgcccgctcgcagagtcgcgtcaggtttggggcctgggtgctggggtccaggtgccggccgccgtgaaagacgtacacggacgagctgtagtgcgatggcgtcagtttcagggacaccgcggtacccccgagccccgtcgtgcgagaacccacgaccacggctacgttggcctcaaagccgctctccacggtcaggcccacgaccaggggcgccacggcgacgtcggcatcgccgctgcgcgccgacagtaacgccagaagctcgatgccttcggacggacacgcgcgagcgtacacgtatcccaggggcccgggggggaccttgatggtggttgccgtcttgggctttgtctccatgtcctcctggcaatcggtccgcaaacggaggtaatcccggcacgacgacggacgcccgacgaggtatgtctcccgagcgtcaaaatccgggggggggggggcggcgacggtcaaggggagggtgggagaccggggttggggaatgaatccctacccttcacagacaacccccgggtaaccacggggtgccgatgaaccccggcggctggcaacgcggggtccctgcgagaggcacagatgcttacggtcaggtgctccgggccgggtgcgtctgatatgcggttggtatatgtacactttacctgggggcgtgccggaccgccccagcccctcccacaccccgcgcgtcatcagccggtgggcgtggccgctattataaaaaaagtgagaacgcgaagcgttcgcactttttttataatagcggccacgcccaccggctacgtcacgctcctgtcggccgccggcggtccataagcccggccggccgggccgacgcgaataaaccgggccgccggccggggcgccgcgcagcagctcgccgcccggatccgccagacaaacaaggcccttgcacatgccggcccgggcgagcctgggggtccggtaattttgccatcccacccaagcggcttttggggtttttcctcttcccccctccccacatcccccctctttaggggttcgggtgggaacaaccgcgatgttttccggtggcggcggcccgctgtcccccggaggaaagtcggcggccagggcggcgtccgggttttttgcgcccgccggccctcgcggagccggccggggacccccgccttgtttgaggcaaaacttttacaacccctacctcgccccagtcgggacgcaacagaagccgaccgggccaacccagcgccatacgtactatagcgaatgcgatgaatttcgattcatcgccccgcgggtgctggacgaggatgcccccccggagaagcgcgccggggtgcacgacggtcacctcaagcgcgcccccaaggtgtactgcgggggggacgagcgcgacgtcctccgcgtcgggtcgggcggcttctggccgcggcgctcgcgcctgtggggcggcgtggaccacgccccggcggggttcaaccccaccgtcaccgtctttcacgtgtacgacatcctggagaacgtggagcacgcgtacggcatgcgcgcggcccagttccacgcgcggtttatggacgccatcacaccgacggggaccgtcatcacgctcctgggcctgactccggaaggccaccgggtggccgttcacgtttacggcacgcggcagtacttttacatgaacaaggaggaggttgacaggcacctacaatgccgcgccccacgagatctctgcgagcgcatggccgcggccctgcgcgagtccccgggcgcgtcgttccgcggcatctccgcggaccacttcgaggcggaggtggtggagcgcaccgacgtgtactactacgagacgcgccccgctctgttttaccgcgtctacgtccgaagcgggcgcgtgctgtcgtacctgtgcgacaacttctgcccggccatcaagaagtacgagggtggggtcgacgccaccacccggttcatcctggacaaccccgggttcgtcaccttcggctggtaccgtctcaaaccgggccggaacaacacgctagcccagccgcgggccccgatggccttcgggacatccagcgacgtcgagtttaactgtacggcggacaacctggccatcgaggggggcatgagcgacctaccggcatacaagctcatgtgcttcgatatcgaatgcaaggcggggggggaggacgagctggcctttccggtggccgggcacccggaggacctggttattcagatatcctgtctgctctacgacctgtccaccaccgccctggagcacgtcctcctgttttcgctcggttcctgcgacctccccgaatcccacctgaacgagctggcggccaggggcctgcccacgcccgtggttctggaattcgacagcgaattcgagatgctgttggccttcatgacccttgtgaaacagtacggccccgagttcgtgaccgggtacaacatcatcaacttcgactggcccttcttgctggccaagctgacggacatttacaaggtccccctggacgggtacggccgcatgaacggccggggcgtgtttcgcgtgtgggacataggccagagccacttccagaagcgcagcaagataaaggtgaacggcatggtgaacatcgacatgtacgggatcataaccgacaagatcaagctctcgagctacaagctcaacgccgtggccgaagccgtcctgaaggacaagaagaaggacctgagctatcgcgacatccccgcctactacgccaccgggcccgcgcaacgcggggtgatcggcgagtactgcatacaggattccctgctggtgggccagctgttttttaagtttttgccccatctggagctctcggccgtcgcgcgcttggcgggtattaacatcacccgcaccatctacgacggccagcagatccgcgtctttacgtgcctgctgcgcctggccgaccagaagggctttattctgccggacacccaggggcgatttaggggcgccgggggggaggcgcccaagcgtccggccgcagcccgggaggacgaggagcggccagaggaggagggggaggacgaggacgaacgcgaggagggcgggggcgagcgggagccggagggcgcgcgggagaccgccggccggcacgtggggtaccagggggccagggtccttgaccccacttccgggtttcacgtgaaccccgtggtggtgttcgactttgccagcctgtaccccagcatcatccaggcccacaacctgtgcttcagcacgctctccctgagggccgacgcagtggcgcacctggaggcgggcaaggactacctggagatcgaggtgggggggcgacggctgttcttcgtcaaggctcacgtgcgagagagcctcctcagcatcctcctgcgggactggctcgccatgcgaaagcagatccgctcgcggattccccagagcagccccgaggaggccgtgctcctggacaagcagcaggccgccatcaaggtcgtgtgtaactcggtgtacgggttcacgggagtgcagcacggactcctgccgtgcctgcacgttgccgcgacggtgacgaccatcggccgcgagatgctgctcgcgacccgcgagtacgtccacgcgcgctgggcggccttcgaacagctcctggccgatttcccggaggcggccgacatgcgcgcccccgggccctattccatgcgcatcatctacggggacacggactccatatttgtgctgtgccgcggcctcacggccgccgggctgacggccatgggcgacaagatggcgagccacatctcgcgcgcgctgtttctgccccccatcaaactcgagtgcgaaaagacgttcaccaagctgctgctgatcgccaagaaaaagtacatcggcgtcatctacgggggtaagatgctcatcaagggcgtggatctggtgcgcaaaaacaactgcgcgtttatcaaccgcacctccagggccctggtcgacctgctgttttacgacgataccgtatccggagcggccgccgcgttagccgagcgccccgcagaggagtggctggcgcgacccctgcccgagggactgcaggcgttcggggccgtcctcgtagacgcccatcggcgcatcaccgacccggagagggacatccaggactttgtcctcaccgccgaactgagcagacacccgcgcgcgtacaccaacaagcgcctggcccacctgacggtgtattacaagctcatggcccgccgcgcgcaggtcccgtccatcaaggaccggatcccgtacgtgatcgtggcccagacccgcgaggtagaggagacggtcgcgcggctggccgccctccgcgagctagacgccgccgccccaggggacgagcccgccccccccgcggccctgccctccccggccaagcgcccccgggagacgccgtcgcatgccgaccccccgggaggcgcgtccaagccccgcaagctgctggtgtccgagctggccgaggatcccgcatacgccattgcccacggcgtcgccctgaacacggactattacttctcccacctgttgggggcggcgtgcgtgacattcaaggccctgtttgggaataacgccaagatcaccgagagtctgttaaaaaggtttattcccgaagtgtggcaccccccggacgacgtggccgcgcggctccgggccgcagggttcggggcggtgggtgccggcgctacggcggaggaaactcgtcgaatgttgcatagagcctttgatactctagcatgagccccccgtcgaagctgatgtccctcattttacaataaatgtctgcggccgacacggtcggaatctccgcgtccgtgggtttctctgcgttgcgccggaccacgagcacaaacgtgctctgccacacgtgggcgacgaaccggtaccccgggcacgcggtgagcatccggtctatgagccggtagtgcaggtgggcggacgtgccgggaaagatgacgtacagcatgtggcccccgtaagtggggtccgggtaaaacaacagccgcgggtcgcacgccccgcctccgcgcaggatcgtgtggacgaaaaaaagctcgggttggccaagaatcccggccaagaggtcctggaggggggcgttgtggcggtcggccaacacgaccaaggaggccaggaaggcgcgatgctcgaatatcgtgttgatctgctgcacgaaggccaggattagggcctcgcggctggtggcggcgaaccgcccgtctcccgcgttgcacgcgggacagcaacccccgatgcctaggtagtagcccatcccggagagggtcaggcagttgtcggccacggtctggtccagacagaagggcagcgacacgggagtggtcttcaccaggggcaccgagaacgagcgcacgatggcgatctcctcggagggcgtctgggcgagggcggcgaaaaggccccgatagcgctggcgctcgtgtaaacacagctcctgtttgcgggcgtgaggcggcaggctcttccgggaggcccgacgcaccacgcccagagtcccgccggccgcagaggagcacgaccgccggcgctccttgccgtgatagggcccgggccgggagccgcggcgatgggggtcggtatcatacataggtacacagggtgtgctccagggacaggagcgagatcgagtggcgtctaagcagcgcgcccgcctcacggacaaatgtggcgagcgcggtgggctttggtacaaatacctgatacgtcttgaaggtgtagatgagggcacgcaacgctatgcagacacgcccctcgaactcgttcccgcaggccagcttggccttgtggagcagcagctcgtcgggatgggtggcggggggatggccgaacagaacccaggggtcaacctccatctccgtgatggcgcacatggggtcacagaacatgtgcttaaagatggcctcgggccccgcggcccgcagcaggctcacaaaccggcccccgtccccgggctgcgtctcggggtccgcctcgagctggtcgacgacgggtacgatacagtcgaagaggctcgtgttgttttccgagtagcggaccacggaggcccggagtctgcgcagggccagccagtaagcccgcaccagtaacaggttacacagcaggcattctccgccggtgcgcccgcgcccccggccgtgtttcagcacggtggccatcagagggcccaggtcgaggtcgggctgggcatcgggttcggtaaactgcgcaaagcgcggagccacgtcgcgcgtgcgtgccccgcgatgcgcttcccaggactggcggaccgtggcgcgacgggcctccgcggcagcgcgcagctggggccccgactcccagacggcgggggtgccggcgaggagcagcaggaccagatccgcgtacgcccacgtatccggcgactcctccggctcgcggtccccggcgaccgtctcgaattccccgttgcgagcggcggcgcgcgtacagcagctgtccccgcccccgcgccgaccctccgtgcagtccaggagacgggcgcaatccttccagttcatcagcgcggtggtgagcgacggctgcgtgccggatcccgccgccgaccccgccccctcctcgcccccggaggccaaggttccgatgagggcccgggtggcagactgcgccaggaacgagtagttggagtactgcaccttggcggctcccggggagggcgagggcttgggttgcttctgggcatgccgcccgggcaccccgccgtcggtacggaagcagcagtggagaaaaaagtgccggtggatgtcgtttatggtgagggcaaagcgtgcgaaggagccgaccagggtcgccttcttggtgcgcagaaagtggcggtccatgacgtacacaaactcgaacgcggccacgaagatgctagcggcgcagtggggcgcccccaggcatttggcacagagaaacgcgtaatcggccacccactggggcgagaggcggtaggtttgcttgtacagctcgatggtgcggcagaccagacagggccggtccagcgcgaaggtgtcgatggccgccgcggaaaagggcccggtgtccaaaagcccctccccacagggatccgggggcgggttgcggggtcctccgcgcccgcccgaaccccctccgtcgcccgcccccccgcgggcccttgagggggcggtgaccacgtcggcggcgacgtcctcgtcgagcgtaccgacgggcggcacacctatcacgtgactggccgccaggagctcggcgcagagagcctcgttaagagccaggaggctgggatcgaaggccacatacgcgcgctcgaacgcccccgccttccagctgctgccgggggactcttcgcacaccgcgacgctcgccaggaccccggggggcgaagttgccatggctgggcgggaggggcgcacgcgccagcgaactttacgggacacaatccccgactgcgcgctgcggtcccagaccctggagagtctagacgcgcgctacgtctcgcgagacggcgcgcatgacgcggccgtctggttcgaggatatgacccccgccgagctggaggttgtcttcccgactacggacgccaagctgaactacctgtcgcggacgcagcggctggcctccctcctgacgtacgccgggcctataaaagcgcccgacgacgccgccgccccgcagaccccggacaccgcgtgtgtgcacggcgagctgctcgcccgcaagcgggaaagattcgcggcggtcattaaccggttcctggacctgcaccagattctgcggggctgacgcgcgcgctgttgggcgggacggttcgcgaaccctttggtgggtttacgcgggcacgcacgctcccatcgcgggcgccatggcgggactgggcaagccctaccccggccacccaggtgacgccttcgagggtctcgttcagcgaattcggcttatcgtcccatctacgttgcggggcggggacggggaggcgggcccctactctccctccagcctcccctccaggtgcgcctttcagtttcatggccatgacgggtccgacgagtcgtttcccatcgagtatgtactgcggcttatgaacgactgggccgaggtcccgtgcaacccttacctgcgcatacagaacaccggcgtgtcggtgctgtttcaggggttttttcatcgcccacacaacgcccccgggggcgcgattacgccagagcggaccaatgtgatcctgggctccaccgagacgacggggctgtccctcggcgacctggacaccatcaaggggcggctcggcctggatgcccggccgatgatggccagcatgtggatcagctgctttgtgcgcatgccccgcgtgcagctcgcgtttcggttcatgggccccgaagatgccggacggacgagacggatcctgtgccgcgccgccgagcaggctattacccgtcgccgccgaacccggcggtcccgggaggcgtacggggccgaggccgggctgggggtggctggaacgggtttccgggccaggggggacggttttggcccgctccccttgttaacccaagggccctcccgcccgtggcaccaggccctgcggggtcttaagcacctacggattggcccccccgcgctcgttttggcggcgggactcgtcctgggggccgctatttggtgggtggttggtgctggcgcgcgcctataaaaaaggacgcaccgccgccctaatcgccagtgcgttccggacgccttcgccccacacagccctcccgtccgacacccccatatcgcttcccgacctccggtcccgatggccgtcccgcaatttcaccgccccagcaccgttaccaccgatagcgtccgggcgcttggcatgcgcgggctcgtcttggccaccaataactctcagtttatcatggataacaaccacccgcacccccagggcacccaaggggccgtgcgggagtttctccgcggtcaggcggcggcgctgacggaccttggtctggcccacgcaaacaacacgtttaccccgcagcctatgttcgcgggcgacgccccggccgcctggttgcggcccgcgtttggcctgcggcgcacctattcaccgtttgtcgttcgagaaccttcgacgcccgggaccccgtgaggcccggggagttccttctggggtgttttaatcaataaaagaccacaccaacgcacgagccttgcgtttaatgtcgtgtttattcaagggagtgggatagggttcgacggttcgaaacttaacacacaaaataatcgagcgcgtctagcccagtaacatgcgcacgtgatgtaggctggtcagcacggcgtcgctgtgatgaagcagcgcccggcgggtccgctgtaactgctgttgtaggcggtaacaggcgcggatcagcaccgccagggcgctacgaccggtgcgttgcacgtagcgtcgcgacagaactgcgtttgccgatacgggcggggggccgaattgtaagcgcgtcacctcttgggagtcatcggcggataacgcactgaatggttcgttggttatgggggagtgtggttcccgagggagtgggtcgagcgcctcggcctcggaatccgagaggaacaacgaggtggtgtcggagtcttcgtcgtcagagacatacagggtctgaagcagcgacacgggcgggggggtagcgtcaatgtgtagcgcgagggaggatgcccacgaagacaccccagacaaggagctgcccgtgcgtggatttgtggacgacgcggaagccgggacggatgggcggttttgcggtgcccggaaccgaaccgccggatactccccgggtgctacatgcccgttttggggctggggttggggctggggctggggctggggttggggctggggttggggttggggctggggttggggctggggctggggttggggctggggttggggctggggttggggctgggggttgggggttggggctgggggttggggttggggctgggggctggggctggggttggggctggggttgggggttgggggctggggttgggggttgggggctggggctggggctggggttggggctggggttggggctggggttggggctggggttgggggctgggggctggggttggggttagttggggttggggttggggctgggggttggggttggggggtggggttggggttggggctgggggttgggggctggggttggggctggggttggggctggggttggggctggggttggggctggggttggggctggggttggggctggggttggggctggggttggggctggggttggggctggggttggggctggggttggggctggggcgcggacaggcggttgacggtcaaatgcccccgggggcgcgcagatgtggtgggcgtggccaccggctgccgtgtagtggggcggcgggaaaccgggcctccgggcgtaacaccgccctccagcgtcaagtatgtggggggcgggcctgacgtcgggggcggggtgacgggttggaccgcgggaggcgggggagagggacctgcgggagaggatgaggtcggctcggccgggttgcggcctaaaacaggggccgtggggtcggcggggtcccagggtgaagggagggattcccgcgattcggacagcgacgcgacagcggggcgcgtaaggcgccgctgcggcccgcctacgggaaccctggggggggttggcgcgggacccgaggttagcggggggcggcggttttcgcccccgggcaaaaccgtgccggttgcgaccgggggcggaacgggatcgatagggagagcgggagaagcctggccggcgaactggggaccgagcgggaggggcacaccagacaccaaagcgtggagcgctggctctgggggtttgggaggggccggggggcgcgcgaaatcggtaaccggggcgaccgtgtcggggagggcaggcggccgccaaccctgggtggtcgcggaagcctgggtggcgcgcgccagggagcgtgcccggcggtgtcggcgcgcgcgcgacccggacgaagaagcggcagaagcgcgggaggaggcgggggggcggggggcggtggcatcggggggcgccggggaactttggggggacggcaagcgccggaagtcgtcgcgggggcccacgggcgccggccgcgtgctttcggccgggacgcccggtcgtgcttcgcgagccgtgactgccggcccagggggccgcggtgcacactgggacgtggggacggactgatcggcggtgggcgaaagggggtccggggcaaggaggggcgcggggccgccggagtcgtcagacgcgagctcctccaggccgtgaatccatgcccacatgcgaggggggacgggctcgccgggggtggcgtcggtgaatagcgtgggggccaggcttccgggccccaacgagccctccgtcccaacaaggtccgccgggccgggggtcgggttcgggaccgaggggctctggtcgtcgggggcgcgctggtacaccggatgccccgggaatagctcccccgacaggagggaggcgtcgaacggccgcccgaggatagctcgcgcgaggaaggggtcctcgtcggtggcgctggcggcggggccggccacgccgcccgccacaaacgggagctcctcggtggcctcgctgccaacaaaccgcacggcgggggggccgggggggtccgggttttcccacaacaccgcgaccggggtcatggagatgtccacgagcaccagacacggcgggccccgggcgaggggccgctcggcgatgagcgcggacaggcgcgggagctgtgccgccagacacgcgttttcaatcgggttcaggtcggcgtgcaggaggcggacggcccacgtctcgatgtcggacgacacggcatcgcgcaaggcggcgtccggcccgcgagcgcgtgagtcaaacagcgtgagacacagctccagctccgactcgcgggaaaaggccgtggtgttgcggagcgccacgacgacgggcgcgcccaggagcactgccgccagcaccaggtccatggccgtaacgcgcgccgcgggggtgcggtgggtggcggcggccggcacggcgacgtgctggcccgtgggccggtagagggcgttggggggagcggggggtgacgcctcgcgcccccccgaggggctcagcgtctgcccagattccagacgcgcggtcagaagggcgtcgaaactgtcatactctgtgtagtcgtccggaaacatgcaggtccaaagagcggccagagcggtgcttgggagacacatgcgcccgaggacgctcaccgccgccagcgcctgggcgggactcagctttcccagcgcggcgccgcgctcggttcccagctcggggaccgagcgccagggcgccagggggtcggtttcggacaacttgccgcggcgccagtctgccagccgcgtgccgaacatgaggccccgggtcggagggcctccggtcgaaaacactggcagcacgcggatgcgggcgtctggatgcggggtcaggcgctgcacgaatagcatggaatctgctgcgttctgaaacgcacgggggagggtgagatgcatgtactcgtgttggcggaccagatccaggcgccaaaaggtgtaaatgtgttccggggagctggccaccagcgccaccagcacgtcgttctcgttaaaggaaacgcggtgcctagtggagctgtggggcccgagcggcggtcccggggccgccgcgtcacccccccattccagctgggcccagcgacacccaaactcgcgcgtgagagtggtcgcgacgagggcgacgtagagctcggccgccgcatccatcgaggccccccatctcgcctggcggtggcgcacaaagcgtccgaagagctgaaagttggcggcctgggcgtcgctgagggccagctgaagccggttgatgacggtgatgacgtacatggccgtgacggtcgaggccgactccagggtgtccgtcggaagcggggggcgaatgcatgccgcctcgggacacatcagcagcgcgccgagcttgtcggtcacggccgggaagcagagcgcgtactgcagtggcgttccatccgggaccaaaaagctgggggcgaacggccgatccagcgtactggtggcctcgcgcagcaccaggggccccgggcctccgctcactcgcaggtacgcctcgccccggcggcgcagcatctgcgggtcggcctcttggccgggtggggcggacgcccgggcgcgggcgtctagggcgcgaagatccacgagcaggggcgcgggggcggcgcccccccccgcgcccgtctggcctgtggccttggcgtacgcgctatataagcccatgcggcgttggatgagctcccgcgcgccccggaactcctccaccgcccatggggccaggtccccggccaccgcgtcgaattccgccaacaggccccccagggtgtcaaagttcatctcccaggccacccttggcaccacctcgtcccgcagccgggcgctcaggtcggcgtgttgggccacgcgccccccgagctcctccacggccccggcccgctcggcgctcttggcgcccaggacgccctggtacttggcgggaaggcgctcgtagtcccgctgggctcgcagccccgacacagtgttggtggtgtcctgcagggcgcgaagctgctcgcatgccgcgcgaaatccctcgggcgatttccaggcccccccgcgaacgcggccgaagcgaccccatacctcgtcccactccgcctcggcctcctcgagagacctccgcagggcctcgacgcggcgacgggtgtcgaagagcgcctgcaggcgcgcgccctgtcgcgtcaggaggcccgggccgtcgccgctggccgcgtttagcgggtgcgtctcaaaggtacgctgggcatgttccaaccaggcgaccgcctgcacgtcgagctcgcgcgccttctccgtctggtccaacagaatttcgacctgatccgcgatctcctccgccgagcgcgcctggtccagcgtcttggccacggtcgccgggacggcgaccaccttcagcagggtcttcagattggccagaccctcggcctcgagctgggcccggcgctcgcgcgcggccagcacctcccgcagccccgccgtgacccgctcggtggcttcggcgcgctgctgtttggcgcgcaccacggcgtccttggtatcggccaggtcctgtcgggtcacgaatgcgacgtagtcggcgtacgccgtgtccttcacggggctctggtccacgcgctccagcgccgccacgcacgccaccagcgcgtcctcgctcgggcagggcagggtgacccctgcccggacaagctcggcggccgccgccgggtcgttgcgcaccgcggatatctcctccgcggcggcggccaggtccagcgccacgcttccgatcgcgcgccgcgcgtcggcccggagggcgtccaggcgatcgcggatatccacgtactcggcgtagcccttttgaaaaaacggcacgtactggcgcagggccggcacgccccccaagtcttccgacaggtgtaggacggcctcgtggtagtcgataaacccgtcgttcgcctgggcccgctccagcagcccccccgccagccgcagaagccgcgccaggggctcggtgtccacccgaaacatgtcggcgtacgtgtcggccgcggccccgaaggccgcgctccagtcgatgcggtgaatggctgcgagcggggggagcatggggtggcgctggttctcgggggtgtatgggttaaacgcaagggccgtctccagggcaagggtcaccgccttggcgttggttcccagcgcctgttcggcccgctttcggaagtcccgggggttgtagccgtgcgtgcccgccagcgcctgcaggcgacggagctcgaccacgtcaaactcggcaccgctttccacgcggtccagcacggcctccacgtcggcggcccagcgctcgtggctactgcgggcgcgctgggccgccatcttctctctcaggtcggcgatggcggcctcaagttcgtcggcgcggcgtcgcgtggcgccgatgacctttcccagctcctgcagggcgcgcccgctgggggagtggtccccggccgtcccttcggcgtgcaacaggcccccgaacctgccctcgtggcccgcgaggctttcccgcgcgccggtggtcgcgcgcgtcgcggcctggatcagggaggcatgctctccctccggttggttggcggcccggcgcacctggacgacaaggtcggctgccgccgaccctaaggtcgtgagctgggcgatggccccccgcgcgtccagggccaaccgagtcgccttgacgtatcccgcggcgctgtcggccatggccgctaggaaggccaggggggaggccgggtcgctggcggccgcgcccagggccgtcaccgcgtcgaccaggacgcggtgcgcccgcacggccgcatccaccgtcgacgcggggtctgccgtcgcgacggcggcgctgccggcgttgatggcgttcgagacggcgtgggctatgatcggggcgtgatcggcgaagaactgcaagagaaacggagtctctggggcgtcggcgaacaggttcttcagcaccaccacgaagctgggatgcaagccagacagagccgtcgccgtgtccggagtcgggtgctccagggcatctcggtactgccccagcagcccccacatgtccgcccgcagcgccgccgtaacctcagggggcgccccccgaacggcctcggggaggtccgaccagcccgccggcagggaggcccgcagggtcgccaggacggccggacaggcctttagccccacaaagtcagggagggggcgcaggaccccctggagtttgtgcaagaacttctcccgggcgtcgcgggccaccttcgcccgctcccgcgctccctcgagcattgcctccagggagcgcgcgcgctcccgcaaacgggcacgcgcatcgggggcgagctctgccgtcagcttggcggcatccatggcccgcgcctgccgcagcgcttcctcggccatgcgcgtggcctctggcgacagcccgccgtcgtcggggtagggcgacgcgccgggcgcaggaacaaaggccgcgtcgctgtccagctgctggcccagggccgcatctagggcgtcgaagcgccgcagctcggccagacccgagctgcggcgcgcctgctggtcgttaatgtcgcggatgctgcgcgccagctcgtccagcggcttgcgttctatcagcccttggttggcggcgtccgtcaggacggagagccaggccgccaggtcctcgggggcgtccagcgtctggccccgctggatcagatcccgcaataggatggccgtggggctggtcgcgatcgggggcggggcgggaatggcggcgcgctgcgcgatgtcccgcgtgtgctggtcgaagacaggcagggactcgagcagctggaccacgggcacgacggcggccgaagccacgtgaaaccggcggtcgttgttgtcgctggcctgtagagccttggcgctgtatacggccccccggtaaaagtactccttaaccgcgccctcgatcgcccgacgggcctgggtccgcacctcctccagccgaacctgaacggcctcggggcccagggggggtgggcgcggagccccctgcggggccgccccggccggggcgggcattacgccgaggggcccggcgtgctgtgagaccgcgtcgaccccgcgagcgagggcgtcgagggcctcgcgcatctggcgatcctccgcctccaccctaatctcttcgccacgggcaaatttggccagagcctggactctatacagaagcggttctgggtgcgtcggggtggcgggggcaaaaagggtgtccgggtgggcctgcgagcgctccagaagccactcgccgaggcgtgtatacagattggccggcggggccgcgcgaagctgcagctccaggtccgcgagttccccgtaaaaggcgtccgtctcccgaatgacatccctagccacaaggatcagcttcgccagcgccaggcgaccgatcagagagttttcgtccagcacgtgctggacgaggggcagatgggcggccacgtcggccaggctcaggcgcgtggaggccagaaagtcccccacggccgttttccggggcagcatgctcagggtaaactccagcagggcggcggccgggccggccaccccggcctgggtgtgcgtccgggccccgttctcgatgagaaaggcgaggacgcgttcaaagaaaaaaataacacagagctccagcagccccggagaagccggatacggcgaccgtaaggcgctgatggtgagccgcgaacacgcggcgacctcgcgggccagggtggcggagcacgcggtgaacttaaccgccgtggcggccacgtttgggtgggcctcgaacagctgggcgaggtctgcgcccgggggctcgggtgagcggcgagtcttcagcgcctcgagggcctgtgaggacgccggaaccatgggcccgtcgtcctcgcccgcctcggcgaccggcggcccggccgggtcggggggtgccgaggcgaggacaggctccggaacggaggcggggaccgcggccccgacgggggttttgcctttgggggtggatttcttcttggttttggcagggggggccgagcgtttcgttttctcccccgaagtcaggtcttcgacgctggaaggcggagtccaggtgggtcggcggcgcttgggaaggccggccgagtagcgtgcccggtgccgaccaaccgggacgacgcccatctccaggacccgcatgtcgtcgtcatcttcttcggccgcctctgcggcgggggtcttgggggcggagggaggcggtggtgggatcgcggagggtgggtcggcggaggggggatccgtgggtggggtaccctttagggccaccgcccatacatcgtcgggcgcccgattcgggcgcttggcctctggttttgccgacggaccggccgtcccccgggatgtctcggaggccctgtcgtcgcgacgggcccgggtcggtggcggcgactgggcggctgtgggcgggtgtggccccggcccccctcccccctcccgggggcccacgccgacgcagggctcccccaggcccgcgatctcgccccgcagggggtgcgtgatggccacgcgccgttcgctgaacgcttcgtcctgcatgtaagtctcgctggccccgtaaagatgcagagccgcggccgtcaagtccgcaggagccgcgggttccgggcccgacggcacgaaaaacaccatggctcccgcccaccgtacgtccgggcgatcgcgggtgtaatacgtcaggtatggatacatgtcccccgcccgcactttggcgatgaacgcgggggtgccctccggaaggccatgcgggtcaaaaaggtatgcggtgtcgccgtccctgaacagccccatccctagggggccaatggttaggagcgtgtacgacagggggcgcagggcccacgggccggcgaagaacgtgtgtgcggggcattgtgtctccagcaggcctgccgcgggctccccgaagaagcccacctcgccgtatacgcgcgagaagacacagcgcagtccgccgcgcgcccctgggtactcgaggaagttggggagctcgacgatcgaacacatgcgcggcggcccagggcccgcagtcgcgcgcgtccactcgcccccctcgaccaaacatccctcgatggcctccgcggacagaacgtcgcgagggcccacatcaaatatgaggctgagaaaggacagcgacgagcgcatgcacgataccgacccccccggctccaggtcgggcgcgaactggttccgagcaccggtgaccacgatgtcgcgatcccccccgcgttccatcgtggagtgcggtggggtgcccgcgatcatatgtgccctgcgggccagagacccggcctgtttatggaccggacccccggggttagtgttgtttccgccacccacgcccccgtaccatggccccggttcccctgattaggctacgagtcgcggtgatcgcttcccaaaaaccgagctgcgtttgtctgtcttggtcttccccccccccagcccgcacaccataacaccgagaacaacacacgggggtgggcggaacataataaagctttattggtaactagttaacggcaagtccgtgggtggcgcgacggtgtcctccgggatcatctcgtcgtcctcgacgggggtgttggaatgaggcgcctcctcgcggtccacctggcgtgggccgtgcccataggcctccggcttctgtgcgtccatgggcgtaggcgcggggagactgtttccggcgtcgcggacctccaggtccctgggagcctccggtccggctaacggacgaaacgcggaagcgcgaaacacgccgtcggtgacccgcaggagctcgttcatcagtaaccaatccatactcagcgtaacggccaacccctggcgagacagatccacggagtccggaaccgcggtcgtctggcccagggggccgaggctgtagtccccccaggcccctaggtcgcgacggctcgtaagcacgacgcggtcggccgcggggctttgcgggggggcgtcctcgggcgcatgcgccattacctctcggatggccgcggcgcgctggtcggccgagctgaccaagggcgccacgaccacggcgcgctccgtctgcaggcccttccacgtgtcgtggagttcctggacaaactcggccacgggctcgggtcccgcggccgcgcgcgcggcttgatagcaggccgacagacgccgccagcgcgctagaaactgacccatgaaacaaaacccggggacctggtctcccgacagcagcttcgacgcccgggcgtgaatgccggacacgacggacagaaacccgtgaatttcgcgccggaccacggccagcacgttgtcctcgtgcgacacctgggccgccagctcgtcgcacacccccaggtgcgccgtggtttcggtgatgacggaacgcaggctcgcgagggacgcgaccagcgcgcgcttggcgtcgtgatacatgctgcagtactgactcaccgcgtcccccatggcctcggggggccagggccccaggcggtcgggcgtgtccccgaccaccgcatacaggcggcgcccgtcgctctcgaaccgacactcgaaaaaggcggagagcgtgcgcatgtgcagccgcagcagcacgatggcgtcctccagttggcgaatcagggggtcggcgcgctcggcgaggtcctgcagcaccccccgggcagccagggcgtacatgctaatcaacaggaggctggtgcccacctcggggggcggggggggctgcagttggaccaggggccgcagctgctcgacggcacccctggagatcacgtacagctcccggagcagctgctctatgttgtcggccatctgcatagtggggccgaggccgccccgggcggccggttcgaggagagtgatcagcgcgcccagtttggtgcgatggccctcgaccgtggggagatagcccagcccaaagtcccgggcccaggccaacacacgcagggcgaactcgaccgggcggggaaggtaggccgcgctacacgtggccctcagcgcgtccccaaccaccagggccagaacgtaggggacgaagcccgggtcggcgaggacgttggggtgaatgccctcgagggcggggaagcggatctgggtcgccgcggccaggtggacagagggggcatggctgggctgcccgacggggagaagcgcggacagcggcgtggccggggtggtgggggtgatgtcccagtgggtctgaccatacacgtcgatccagatgagcgccgtctcgcggagaaggctgggttgaccggaactaaagcggcgctcggccgtctcaaactcccccacgagcgcccgccgcaggctcgccagatgttccgtcggcacggccggccccatgatacgcgccagcgtctggctcagaacgccccccgacaggccgaccgcctcacagagccgcccgtgcgtgtgctcgctggcgccctggacccgcctgaaagtttttacgtagttggcatagtacccgtattcccgcgccagaccaaacacgttcgaccccgcgagggcaatgcacccaaagagctgctggacttcgccgagtccgtggccggcgggcggccgcgcggggacgcccgccgccagaaacccctccagggccgaaaggtagtgcgtgcagtgcgagggcgtgaacccagcgtcgatcagggtgttgatcaccacggagggcgaattggtattctggatcaacgtccacgtctgctgcagcagagccagcagccgctgctgggcgccggcggagggctgctccccgagctgcagcaggctggagacggcaggctggaagactgccagtgccgacgaactcaggaacggcacgtcgggatcaaacacggccacgtccgtccgcacgcgcgccattagcgtccccgggggcgcacaggccgagcgcgggctgacgcggctgagggccgtcgacacgcgcacctcctcgcggctgcgaaccatcttgttggcctccagtggcggaatcattatggccgggtcgatctcccgcacggtgtgctgaaactgcgccaacaggggcggcgggaccacagccccccgctcgggggtcgtcaggtactcgtccaccagggccaacgtaaagagggcccgtgtgaggggagtgagggtcgcgtcgtctatgcgctggaggtgcgccgagaacagcgtcacccgattactcaccagggccaagaaccggaggccctcttgcacgaacggggcggggaagagcaggctgtacgccggggtggtaaggttcgcgctgggctgccccaacgggaccggcgccagcttgagcgacgtctccccaagggcctcgatggaggtccgcgggctcatggccaagcagctcttggtgacggtttgccagcggtctatccactccacggcgcactggcggacgcggaccggccccagggccgccgcggtgcgcaggccggcggactccagcgcatgggacgtgtcggagccggtgaccgcgaggatggtgtccttgatgacctccatctcccggaaggcctggtcgggggcctcggggagagccaccaccaagcggtgtacgagcaacccggggaggttctcggccaagagcgccgtctccggaagcccgtgggcccggtggagcgcgcacaggtgttccagcagcggccgccagcatgcccgcgcgtctgccggggcgatggccgttcccgacaacagaaacgccgccatggcggcgcgcagcttggccgtggccagaaacgccgggtcgtccgccccgtttgccgtctcggccgtgggggttggcggttggcgaaggccggctaggctcgccaataggcgctgcataggtccgtccgagggcggaccggcgggtgaggtcgtgacgacgggggcctcggacgggagaccgcggtctgccatgacgcccggctcgcgtgggtgggggacagcgtagaccaacgacgagaccgggcgggaatgactgtcgtgcgctgtagggagcggcgaattatcgatcccccgcggccctccaggaaccccgcaggcgttgcgagtaccccgcgtcttcgcggggtgttatacggccacttaatgaattcataacttcgtatagcatacattatacgaagttattaattaatcgaccaattctcatgtttgacagcttatcatcgaatttctgccattcatccgcttattatcacttattcaggcgtagcaaccaggcgtttaagggcaccaataactgccttaaaaaaattacgccccgccctgccactcatcgcagtactgttgtaattcattaagcattctgccgacatggaagccatcacaaacggcatgatgaacctgaatcgccagcggcatcagcaccttgtcgccttgcgtataatatttgcccatggtgaaaacgggggcgaagaagttgtccatattggccacgtttaaatcaaaactggtgaaactcacccagggattggctgagacgaaaaacatattctcaataaaccctttagggaaataggccaggttttcaccgtaacacgccacatcttgcgaatatatgtgtagaaactgccggaaatcgtcgtggtattcactccagagcgatgaaaacgtttcagtttgctcatggaaaacggtgtaacaagggtgaacactatcccatatcaccagctcaccgtctttcattgccatacgaaattccggatgagcattcatcaggcgggcaagaatgtgaataaaggccggataaaacttgtgcttatttttctttacggtctttaaaaaggccgtaatatccagctgaacggtctggttataggtacattgagcaactgactgaaatgcctcaaaatgttctttacgatgccattgggatatatcaacggtggtatatccagtgatttttttctccattttagcttccttagctcctgaaaatctcgataactcaaaaaatacgcccggtagtgatcttatttcattatggtgaaagttggaacctcttacgtgccgatcaacgtctcattttcgccaaaagttggcccagggcttcccggtatcaacagggacaccaggatttatttattctgcgaagtgatcttccgtcacaggtatttattcgcgataagctcatggagcggcgtaaccgtcgcacaggaaggacagagaaagcgcggatctgggaagtgacggacagaacggtcaggacctggattggggaggcggttgccgccgctgctgctgacggtgtgacgttctctgttccggtcacaccacatacgttccgccattcctatgcgatgcacatgctgtatgccggtataccgctgaaagttctgcaaagcctgatgggacataagtccatcagttcaacggaagtctacacgaaggtttttgcgctggatgtggctgcccggcaccgggtgcagtttgcgatgccggagtctgatgcggttgcgatgctgaaacaattatcctgagaataaatgccttggcctttatatggaaatgtggaactgagtggatatgctgtttttgtctgttaaacagagaagctggctgttatccactgagaagcgaacgaaacagtcgggaaaatctcccattatcgtagagatccgcattattaatctcaggagcctgtgtagcgtttataggaagtagtgttctgtcatgatgcctgcaagcggtaacgaaaacgatttgaatatgccttcaggaacaatagaaatcttcgtgcggtgttacgttgaagtggagcggattatgtcagcaatggacagaacaacctaatgaacacagaaccatgatgtggtctgtccttttacagccagtagtgctcgccgcagtcgagcgacagggcgaagccctcgagctggttgccctcgccgctgggctggcggccgtctatggccctgcaaacgcgccagaaacgccgtcgaagccgtgtgcgagacaccgcggccggccgccggcgttgtggatacctcgcggaaaacttggccctcactgacagatgaggggcggacgttgacacttgaggggccgactcacccggcgcggcgttgacagatgaggggcaggctcgatttcggccggcgacgtggagctggccagcctcgcaaatcggcgaaaacgcctgattttacgcgagtttcccacagatgatgtggacaagcctggggataagtgccctgcggtattgacacttgaggggcgcgactactgacagatgaggggcgcgatccttgacacttgaggggcagagtgctgacagatgaggggcgcacctattgacatttgaggggctgtccacaggcagaaaatccagcatttgcaagggtttccgcccgtttttcggccaccgctaacctgtcttttaacctgcttttaaaccaatatttataaaccttgtttttaaccagggctgcgccctgtgcgcgtgaccgcgcacgccgaaggggggtgcccccccttctcgaaccctcccggtcgagtgagcgaggaagcaccagggaacagcacttatatattctgcttacacacgatgcctgaaaaaacttcccttggggttatccacttatccacggggatatttttataattattttttttatagtttttagatcttcttttttagagcgccttgtaggcctttatccatgctggttctagagaaggtgttgtgacaaattgccctttcagtgtgacaaatcaccctcaaatgacagtcctgtctgtgacaaattgcccttaaccctgtgacaaattgccctcagaagaagctgttttttcacaaagttatccctgcttattgactcttttttatttagtgtgacaatctaaaaacttgtcacacttcacatggatctgtcatggcggaaacagcggttatcaatcacaagaaacgtaaaaatagcccgcgaatcgtccagtcaaacgacctcactgaggcggcatatagtctctcccgggatcaaaaacgtatgctgtatctgttcgttgaccagatcagaaaatctgatggcaccctacaggaacatgacggtatctgcgagatccatgttgctaaatatgctgaaatattcggattgacctctgcggaagccagtaaggatatacggcaggcattgaagagtttcgcggggaaggaagtggttttttatcgccctgaagaggatgccggcgatgaaaaaggctatgaatcttttccttggtttatcaaacgtgcgcacagtccatccagagggctttacagtgtacatatcaacccatatctcattcccttctttatcgggttacagaaccggtttacgcagtttcggcttagtgaaacaaaagaaatcaccaatccgtatgccatgcgtttatacgaatccctgtgtcagtatcgtaagccggatggctcaggcatcgtctctctgaaaatcgactggatcatagagcgttaccagctgcctcaaagttaccagcgtatgcctgacttccgccgccgcttcctgcaggtctgtgttaatgagatcaacagcagaactccaatgcgcctctcatacattgagaaaaagaaaggccgccagacgactcatatcgtattttccttccgcgatatcacttccatgacgacaggatagtctgagggttatctgtcacagatttgagggtggttcgtcacatttgttctgacctactgagggtaatttgtcacagttttgctgtttccttcagcctgcatggattttctcatactttttgaactgtaatttttaaggaagccaaatttgagggcagtttgtcacagttgatttccttctctttcccttcgtcatgtgacctgatatcgggggttagttcgtcatcattgatgagggttgattatcacagtttattactctgaattggctatccgcgtgtgtacctctacctggagtttttcccacggtggatatttcttcttgcgctgagcgtaagagctatctgacagaacagttcttctttgcttcctcgccagttcgctcgctatgctcggttacacggctgcggcgagcgctagtgataataagtgactgaggtatgtgctcttcttatctccttttgtagtgttgctcttattttaaacaactttgcggttttttgatgactttgcgattttgttgttgctttgcagtaaattgcaagatttaataaaaaaacgcaaagcaatgattaaaggatgttcagaatgaaactcatggaaacacttaaccagtgcataaacgctggtcatgaaatgacgaaggctatcgccattgcacagtttaatgatgacagcccggaagcgaggaaaataacccggcgctggagaataggtgaagcagcggatttagttggggtttcttctcaggctatcagagatgccgagaaagcagggcgactaccgcacccggatatggaaattcgaggacgggttgagcaacgtgttggttatacaattgaacaaattaatcatatgcgtgatgtgtttggtacgcgattgcgacgtgctgaagacgtatttccaccggtgatcggggttgctgcccataaaggtggcgtttacaaaacctcagtttctgttcatcttgctcaggatctggctctgaaggggctacgtgttttgctcgtggaaggtaacgacccccagggaacagcctcaatgtatcacggatgggtaccagatcttcatattcatgcagaagacactctcctgcctttctatcttggggaaaaggacgatgtcacttatgcaataaagcccacttgctggccggggcttgacattattccttcctgtctggctctgcaccgtattgaaactgagttaatgggcaaatttgatgaaggtaaactgcccaccgatccacacctgatgctccgactggccattgaaactgttgctcatgactatgatgtcatagttattgacagcgcgcctaacctgggtatcggcacgattaatgtcgtatgtgctgctgatgtgctgattgttcccacgcctgctgagttgtttgactacacctccgcactgcagtttttcgatatgcttcgtgatctgctcaagaacgttgatcttaaagggttcgagcctgatgtacgtattttgcttaccaaatacagcaatagcaatggctctcagtccccgtggatggaggagcaaattcgggatgcctggggaagcatggttctaaaaaatgttgtacgtgaaacggatgaagttggtaaaggtcagatccggatgagaactgtttttgaacaggccattgatcaacgctcttcaactggtgcctggagaaatgctctttctatttgggaacctgtctgcaatgaaattttcgatcgtctgattaaaccacgctgggagattagataatgaagcgtgcgcctgttattccaaaacatacgctcaatactcaaccggttgaagatacttcgttatcgacaccagctgccccgatggtggattcgttaattgcgcgcgtaggagtaatggctcgcggtaatgccattactttgcctgtatgtggtcgggatgtgaagtttactcttgaagtgctccggggtgatagtgttgagaagacctctcgggtatggtcaggtaatgaacgtgaccaggagctgcttactgaggacgcactggatgatctcatcccttcttttctactgactggtcaacagacaccggcgttcggtcgaagagtatctggtgtcatagaaattgccgatgggagtcgccgtcgtaaagctgctgcacttaccgaaagtgattatcgtgttctggttggcgagctggatgatgagcagatggctgcattatccagattgggtaacgattatcgcccaacaagtgcttatgaacgtggtcagcgttatgcaagccgattgcagaatgaatttgctggaaatatttctgcgctggctgatgcggaaaatatttcacgtaagattattacccgctgtatcaacaccgccaaattgcctaaatcagttgttgctcttttttctcaccccggtgaactatctgcccggtcaggtgatgcacttcaaaaagcctttacagataaagaggaattacttaagcagcaggcatctaaccttcatgagcagaaaaaagctggggtgatatttgaagctgaagaagttatcactcttttaacttctgtgcttaaaacgtcatctgcatcaagaactagtttaagctcacgacatcagtttgctcctggagcgacagtattgtataagggcgataaaatggtgcttaacctggacaggtctcgtgttccaactgagtgtatagagaaaattgaggccattcttaaggaacttgaaaagccagcaccctgatgcgacctcgttttagtctacgtttatctgtctttacttaatgtcctttgttacaggccagaaagcataactggcctgaatattctctctgggcccactgttccacttgtatcgtcggtctgataatcagactgggaccacggtcccactcgtatcgtcggtctgattattagtctgggaccacggtcccactcgtatcgtcggtctgattattagtctgggaccacggtcccactcgtatcgtcggtctgataatcagactgggaccacggtcccactcgtatcgtcggtctgattattagtctgggaccatggtcccactcgtatcgtcggtctgattattagtctgggaccacggtcccactcgtatcgtcggtctgattattagtctggaaccacggtcccactcgtatcgtcggtctgattattagtctgggaccacggtcccactcgtatcgtcggtctgattatcggtctgggaccacggtcccacttgtattgtcgatcagactatcagcgtgagactacgattccatcaatgcctgtcaagggcaagtattgacatggttgggcaattcggcgcagcaccatggcctgaaataacctctgaaagaggaacttggttaggtaccttctgaggcggaaagaaccagctgtggaatgtgtgtcagttagggtgtggaaagtccccaggctccccagcaggcagaagtatgcaaagcatgcatctcaattagtcagcaaccaggtgtggaaagtccccaggctccccagcaggcagaagtatgcaaagcatgcatctcaattagtcagcaaccatagtcccgcccctaactccgcccatcccgcccctaactccgcccagttccgcccattctccgccccatggctgactaattttttttatttatgcagaggccgaggccgcctcggcctctgagctattccagaagtagtgaggaggcttttttggaggcctaggcttttgcaaaaagcttgggatctctataatctcgcgcaacctattttcccctcgaacactttttaagccgtagataaacaggctgggacacttcacatgagcgaaaaatacatcgtcacctgggacatgttgcagatccatgcacgtaaactcgcaagccgactgatgccttctgaacaatggaaaggcattattgccgtaagccgtggcggtctggtaccggtgggtgaagaccagaaacagcacctcgaactgagccgcgatattgcccagcgtttcaacgcgctgtatggcgagatcgatcccgtcgttttacaacgtcgtgactgggaaaaccctggcgttacccaacttaatcgccttgcagcacatccccctttcgccagctggcgtaatagcgaagaggcccgcaccgatcgcccttcccaacagttgcgcagcctgaatggcgaatggcgctttgcctggtttccggcaccagaagcggtgccggaaagctggctggagtgcgatcttcctgaggccgatactgtcgtcgtcccctcaaactggcagatgcacggttacgatgcgcccatctacaccaacgtgacctatcccattacggtcaatccgccgtttgttcccacggagaatccgacgggttgttactcgctcacatttaatgttgatgaaagctggctacaggaaggccagacgcgaattatttttgatggcgttaactcggcgtttcatctgtggtgcaacgggcgctgggtcggttacggccaggacagtcgtttgccgtctgaatttgacctgagcgcatttttacgcgccggagaaaaccgcctcgcggtgatggtgctgcgctggagtgacggcagttatctggaagatcaggatatgtggcggatgagcggcattttccgtgacgtctcgttgctgcataaaccgactacacaaatcagcgatttccatgttgccactcgctttaatgatgatttcagccgcgctgtactggaggctgaagttcagatgtgcggcgagttgcgtgactacctacgggtaacagtttctttatggcagggtgaaacgcaggtcgccagcggcaccgcgcctttcggcggtgaaattatcgatgagcgtggtggttatgccgatcgcgtcacactacgtctgaacgtcgaaaacccgaaactgtggagcgccgaaatcccgaatctctatcgtgcggtggttgaactgcacaccgccgacggcacgctgattgaagcagaagcctgcgatgtcggtttccgcgaggtgcggattgaaaatggtctgctgctgctgaacggcaagccgttgctgattcgaggcgttaaccgtcacgagcatcatcctctgcatggtcaggtcatggatgagcagacgatggtgcaggatatcctgctgatgaagcagaacaactttaacgccgtgcgctgttcgcattatccgaaccatccgctgtggtacacgctgtgcgaccgctacggcctgtatgtggtggatgaagccaatattgaaacccacggcatggtgccaatgaatcgtctgaccgatgatccgcgctggctaccggcgatgagcgaacgcgtaacgcgaatggtgcagcgcgatcgtaatcacccgagtgtgatcatctggtcgctggggaatgaatcaggccacggcgctaatcacgacgcgctgtatcgctggatcaaatctgtcgatccttcccgcccggtgcagtatgaaggcggcggagccgacaccacggccaccgatattatttgcccgatgtacgcgcgcgtggatgaagaccagcccttcccggctgtgccgaaatggtccatcaaaaaatggctttcgctacctggagagacgcgcccgctgatcctttgcgaatacgcccacgcgatgggtaacagtcttggcggtttcgctaaatactggcaggcgtttcgtcagtatccccgtttacagggcggcttcgtctgggactgggtggatcagtcgctgattaaatatgatgaaaacggcaacccgtggtcggcttacggcggtgattttggcgatacgccgaacgatcgccagttctgtatgaacggtctggtctttgccgaccgcacgccgcatccagcgctgacggaagcaaaacaccagcagcagtttttccagttccgtttatccgggcaaaccatcgaagtgaccagcgaatacctgttccgtcatagcgataacgagctcctgcactggatggtggcgctggatggtaagccgctggcaagcggtgaagtgcctctggatgtcgctccacaaggtaaacagttgattgaactgcctgaactaccgcagccggagagcgccgggcaactctggctcacagtacgcgtagtgcaaccgaacgcgaccgcatggtcagaagccgggcacatcagcgcctggcagcagtggcgtctggcggaaaacctcagtgtgacgctccccgccgcgtcccacgccatcccgcatctgaccaccagcgaaatggatttttgcatcgagctgggtaataagcgttggcaatttaaccgccagtcaggctttctttcacagatgtggattggcgataaaaaacaactgctgacgccgctgcgcgatcagttcacccgtgcaccgctggataacgacattggcgtaagtgaagcgacccgcattgaccctaacgcctgggtcgaacgctggaaggcggcgggccattaccaggccgaagcagcgttgttgcagtgcacggcagatacacttgctgatgcggtgctgattacgaccgctcacgcgtggcagcatcaggggaaaaccttatttatcagccggaaaacctaccggattgatggtagtggtcaaatggcgattaccgttgatgttgaagtggcgagcgatacaccgcatccggcgcggattggcctgaactgccagctggcgcaggtagcagagcgggtaaactggctcggattagggccgcaagaaaactatcccgaccgccttactgccgcctgttttgaccgctgggatctgccattgtcagacatgtataccccgtacgtcttcccgagcgaaaacggtctgcgctgcgggacgcgcgaattgaattatggcccacaccagtggcgcggcgacttccagttcaacatcagccgctacagtcaacagcaactgatggaaaccagccatcgccatctgctgcacgcggaagaaggcacatggctgaatatcgacggtttccatatggggattggtggcgacgactcctggagcccgtcagtatcggcggaattccagctgagcgccggtcgctaccattaccagttggtctggtgtcaaaaataataataaccgggcaggccatgtctgcccgtatttcgcgtaaggaaatccattatgtactatttaaaaaacacaaacttttggatgttcggtttattctttttcttttacttttttatcatgggagcctacttcccgtttttcccgatttggctacatgacatcaaccatatcagcaaaagtgatacgggtattatttttgccgctatttctctgttctcgctattattccaaccgctgtttggtctgctttctgacaaactcggaacttgtttattgcagcttataatggttacaaataaagcaatagcatcacaaatttcacaaataaagcatttttttcactgcattctagttgtggtttgtccaaactcatcaatgtatcttatcatgtctggatctcccaacaagcttgaattcataacttcgtatagcatacattatacgaagttattaattaagtcccggcatcccgttcgcggacccaggcccgggggattgtccggatgtgcgggcagcccggacggcgtgggttgcggactttcggcggggcggcccaaatggccctttaaacgtgtgtatacggacgcgccgggccagtcggccaacacaacccaccggaggcggtagccgcgtttggctgtggggtgggtggttccgccttgcgtgagtgtcctttcgacccccccccctcccccgggtcttgctaggtcgcgatctgtggtcgcaatgaagaccaatccgctacccgcaaccccttccgtgtggggcgggagtaccgtggaactcccccccaccacacgcgataccgcggggcagggcctgcttcggcgcgtcctgcgccccccgatctctcgccgcgacggcccagtgctccccagggggtcgggaccccggagggcggccagcacgctgtggttgcttggcctggacggcacagacgcgccccctggggcgctgacccccaacgacgataccgaacaggccctggacaagatcctgcggggcaccatgcgcgggggggcggccctgatcggctccccgcgccatcatctaacccgccaagtgatcctgacggatctgtgccaacccaacgcggatcgtgccgggacgctgcttctggcgctgcggcaccccgccgacctgcctcacctggcccaccagcgcgccccgccaggccggcagaccgagcggctgggcgaggcctggggccagctgatggaggcgaccgccctggggtcggggcgagccgagagcgggtgcacgcgcgcgggcctcgtgtcgtttaacttcctggtggcggcgtgtgccgcctcgtacgacgcgcgcgacgccgccgatgcggtacgggcccacgtcacggccaactaccgcgggacgcgggtgggggcgcgcctggatcgtttttccgagtgtctgcgcgccatggttcacacgcacgtcttcccccacgaggtcatgcggtttttcggggggctggtgtcgtgggtcacccaggacgagctagcgagcgtcaccgccgtgtgcgccgggccccaggaggcggcgcacaccggccacccgggccggccccgctcggccgtgatcctcccggcgtgtgcgttcgtggacctggacgccgagctggggctggggggcccgggcgcggcgtttctgtacctggtattcacttaccgccagcgccgggaccaggagctgtgttgtgtgtacgtgatcaagagccagctccccccgcgcgggttggagccggccctggagcggctgtttgggcgcctccggatcaccaacacgattcacggcaccgaggacatgacgcccccggccccaaaccgaaaccccgacttccccctcgcgggcctggccgccaatccccaaaccccgcgttgctctgctggccaggtcacgaacccccagttcgccgacaggctgtaccgctggcagccggacctgcgggggcgccccaccgcacgcacctgtacgtacgccgcctttgcagagctcggcatgatgcccgaggatagtccccgctgcctgcaccgcaccgagcgctttggggcggtcagcgtccccgttgtcatcctggaaggcgtggtgtggcgccccggcgagtggcgggcctgcgcgtgagcgtagcaaacgccccgcccacacaacgctccgcccccaaccccttccccgctgtcactcgttgttcgttgacccggacgtccgccaaataaagccactgaaacccgaaacgcgagtgttgtaacgtcctttgggcgggaggaagccacaaaatgcaaatgggatacatggaaggaacacacccccgtgactcaggacatcggcgtgtccttttgggtttcactgaaactggcccgcgccccacccctgcgcgatgtggataaaaagccagcgcgggtggtttagggtaccacaggtgggtgctttggaaacttgtcggtcgccgtgctcctgtgagcttgcgtccctccccggtttcctttgcgctcccgccttccggacctgctctcgcctatcttctttggctctcggtgcgattcgtcaggcagtggccttgtcgaatctcgaccccaccactcgccggacccgccgacgtcccctctcgagcccgccgaaacccgccgcgtctgttgaaatggccagccgccccgccgcatcctctcccgtcgaagcgcgggccccggttgggggacaggaggccggcggccccagcgcagccacccagggggaggccgccggggcccctctcgcccgcggccaccacgtgtactgccagcgagtcaatggcgtgatggtgctttccgacaagacgcccgggtccgcgtcctaccgcatcagcgatagcaactttgtccaatgtggttccaactgcaccatgatcatagacggagacgtggtgcgcgggcgcccccaggacccgggggccgcggcatcccccgctcccttcgttgcggtgacaaacatcggagccggcagcgacggcgggaccgccgtcgtggcattcgggggaaccccacgtcgctcggcggggacgtctaccggtacccagacgaccgacgtccccaccgaggcccttgggggcccccctcctcctccccgcttcaccctgggtggcggctgttgttcctgtcgcgacacacggcgccgctctgcggtattcgggggggagggggatcccgtcggccccgcggagttcgtctcggacgaccggtcgcccgattccgactcggatgactcggaggacaccgactcggagacgctgtcacacgcctcctcggacgtgtccggcggggccacgtacgacgacgcccttgactccgattcgtcatcggatgactccctgcagatagatggccccgtgtgtcgcccgtggagcaatgacaccgcgcccctggatgtttgccccgggacccccggcccgggcgccgacgccggtggtccctcagcggtagacccacacgcaccgacgccaggggccggcgctggtcttgcggccgatcccgccgtggcccgggacgacgcggaggggctttcggacccccggccacgtctgggaacgggcacggcctaccccgtccccctggaactcacgcccgagaacgcggaggccgtggcgcgctttctgggagatgccgtgaaccgcgaacccgcgctcatgctggagtacttttgccggtgcgcccgcgaggaaaccaagcgtgtcccccccaggacattctgcagcccccctcgcctcacggaggacgactttgggcttctcaactacgcgctcgtggagatgcagcgcctgtgtctggacgttcctccggtcccgccgaacgcatacatgccctattatctcagggagtatgtgacgcggctggtcaacgggttcaagccgctggtgagccggtccgctcgcctttaccgcatcctgggggttctggtgcacctgcggatccggacccgggaggcctcctttgaggagtggctgcgatccaaggaagtggccctggactttggcctgacggaaaggcttcgcgagcacgaagcccagctggtgatcctggcccaggctctggaccattacgactgtctgatccacagcacaccgcacacgctggtcgagcgggggctgcaatcggccctgaagtatgaggagttttacctaaagcgctttggcgggcactacatggagtccgtcttccagatgtacacccgcatcgccggctttttggcctgccgggccacgcgcggcatgcgccacatcgccctggggcgagaggggtcgtggtgggaaatgttcaagttctttttccaccgcctctacgaccaccagatcgtaccgtcgacccccgccatgctgaacctggggacccgcaactactacacctccagctgctacctggtaaacccccaggccaccacaaacaaggcgaccctgcgggccatcaccagcaacgtcagcgccatcctcgcccgcaacgggggcatcgggctatgcgtgcaggcgtttaacgactccggccccgggaccgctagcgtcatacccgccctcaaggtcctcgactcgctggtggcggcgcacaacaaagagagcgcgcgtccaaccggcgcgtgcgtgtacctggagccgtggcacaccgacgtgcgggccgtgctccggatgaagggggtcctcgccggcgaagaggcccagcgctgcgacaatatcttcagcgccctctggatgccagacctgtttttcaagcgcctgattcgccacctggacggcgagaagaacgtcacatggaccctgttcgaccgggacaccagcatgtcgctcgccgactttcacggggaggagttcgagaagctctaccagcacctcgaggtcatggggttcggcgagcagatacccatccaggagctggcctatggcattgtgcgcagtgcggccacgaccgggagccccttcgtcatgttcaaagacgcggtgaaccgccactacatctacgacacccagggggcggccatcgccggctccaacctctgcaccgagatcgtccatccggcctccaagcgatccagtggggtctgcaatctgggaagcgtgaatctggcccgatgcgtctccaggcagacgtttgactttgggcggctccgcgacgccgtgcaggcgtgcgtgctgatggtgaacatcatgatcgacagcacgctacaacccacgccccagtgcacccgcggcaacgacaacctgcggtccatgggaatcggcatgcagggcctgcacacggcctgcctgaaactggggctggatctggagtctgtcgaatttcaggacctgaacaaacacatcgccgaggtgatgctgctgtcggcgatgaagaccagcaacgcgctgtgcgttcgcggggcccgtcccttcaaccactttaagcgcagcatgtatcgcgccggccgctttcactgggagcgctttccggacgcccggccgcggtacgagggcgagtgggagatgctacgccagagcatgatgaaacacggcctgcgcaacagccagtttgtcgcgctgatgcccaccgccgcctcggcgcagatctcggacgtcagcgagggctttgcccccctgttcaccaacctgttcagcaaggtgacccgggacggcgagacgctgcgccccaacacgctcctgctaaaggaactggaacgcacgtttagcgggaagcgcctcctggaggtgatggacagtctcgacgccaagcagtggtccgtggcgcaggcgctcccgtgcctggagcccacccaccccctccggcgattcaagaccgcgtttgactacgaccagaagttgctgatcgacctgtgtgcggaccgcgccccctacgtcgaccatagccaatccatgaccctgtatgtcacggagaaggcggacgggaccctcccagcctccaccctggtccgccttctggtccacgcatataagcgcggactaaaaacagggatgtactactgcaaggttcgcaaggcgaccaacagcggggtctttggcggcgacgacaacattgtctgcacgagctgcgcgctgtgaccgacaaaccccctccgcgccaggcccgccgccactgtcgtcgccgtcccacgcgctcccccgctgccatggattccgcggccccagccctctcccccgctctgacggcccatacgggccagagcgcgccggcggacctggcgatccagattccaaagtgccccgaccccgagaggtacttctacacctcccagtgtcccgacattaaccacctgcgctccctcagcatccttaaccgctggctggaaaccgagcttgttttcgtgggggacgaggaggacgtctccaagctttccgagggcgagctcagcttttaccgcttcctcttcgctttcctgtcggccgccgacgacctggttacggaaaacctgggcggcctctccggcctgtttgagcagaaggacattctccactactacgtggagcaggaatgcatcgaagtcgtacactcgcgcgtgtacaacatcatccagctggtgctttttcacaacaacgaccaggcgcgccgcgagtacgtggccggcaccatcaaccacccggccatccgcgccaaggtggactggctggaagcgcgggtgcgggaatgcgcctccgttccggaaaagttcatcctcatgatcctcatcgagggcatcttttttgccgcctcgtttgccgccatcgcctaccttcgcaccaacaaccttctgcgggtcacctgccagtcaaacgacctcatcagccgggacgaggccgtgcacacgacggcctcgtgttacatctacaacaactacctcggcgggcacgccaagcccccgcccgaccgcgtgtacgggctgttccgccaggcggtcgagatcgagatcggatttatccgatcccaggcgccgacggacagccatatcctgagcccggcggcgctggcggccatcgaaaactacgtgcgattcagcgcggatcgcctgttgggccttatccacatgaagccactgttttccgccccaccccccgacgccagctttccgctgagcctcatgtccaccgacaaacacaccaattttttcgagtgtcgcagcacctcctacgccggggcggtcgtcaacgatctgtgagggtcgcggcgcgcttctacccgtgtttgcccataataaacctctgaaccaaactttgggtctcattgtgattcttgtcagggacgcgggggtgggagaggataaaaggcggcgcaaaaagcagtaaccaggtccgtccagattctgagggcataggataccataattttattggtgggtcgtttgttcggggacaagcgcgctcgtctgacgtttgggctacctgcaggcccgaacaaacccatgtcaggtcgattgtaactgcggatcggcctaactaaggcgtggttggtgcgacggtccgggacacccgagcctgtctctctgtgtatggtgacccagacaacaacaccgacacaagaggacaataatccgttaggggacgctctttataatttcgatggcccaactccacgcggattggtgcagcaccctgcatgcgccggtgtgggccaaacttccccccgctcattgcctcttccaaaagggtgtggcctaacgagctgggggcgtatttaatcaggctagcgcggcgggcctgccgtagtttctggctcggtgagcgacggtccggttgcttgggtcccctggctgccagcaaaaccccaccctcgcagcggcatacgccccctccgcgtcccgcacccgagaccccggcccggctgccctcaccaccgaagcccacctcgtcactgtggggtgttcccagcccgcattgggatgacggattcccctggcggtgtggcccccgcctcccccgtggaggacgcgtcggacgcgtccctcgggcagccggaggagggggcgccctgccaggtggtcctgcagggcgccgaacttaatggaatcctacaggcgtttgccccgctgcgcacgagccttctggactcgcttctggttatgggcgaccggggcatccttatccataacacgatctttggggagcaggtgttcctgcccctggaacactcgcaattcagtcggtatcgctggcgcggacccacggcggcgttcctgtctctcgtggaccagaagcgctccctcctgagcgtgtttcgcgccaaccagtacccggacctacgtcgggtggagttggcgatcacgggccaggccccgtttcgcacgctggttcagcgcatatggacgacgacgtccgacggcgaggccgttgagctagccagcgagacgctgatgaagcgcgaactgacgagctttgtggtgctggttccccagggaacccccgacgttcagttgcgcctgacgaggccgcagctcaccaaggtccttaacgcgaccggggccgatagtgccacgcccaccacgttcgagctcggggttaacggcaaattttccgtgttcaccacgagtacctgcgtcacatttgctgcccgcgaggagggcgtgtcgtccagcaccagcacccaggtccagatcctgtccaacgcgctcaccaaggcgggccaggcggccgccaacgccaagacggtgtacggggaaaatacccatcgcaccttctctgtggtcgtcgacgattgcagcatgcgggcggtgctccggcgactgcaggtcgccgggggcaccctcaagttcttcctcacgacccccgtccccagtctgtgcgtcaccgccaccggtcccaacgcggtatcggcggtatttctcctgaaaccccagaagatttgcctggactggctgggtcatagccaggggtctccttcagccgggagctcggcctcccgggcctctgggagcgagccaacagacagccaggactccgcgtcggacgcggtcagccacggcgatccggaagacctcgatggcgctgcccgggcgggagaggcgggggcctcgcacgcctgtccgatgccgtcgtcgaccacgcgggtcactcccacgaccaagcgggggcgctcggggggcgaggatgcgcgcgcggacacggccctaaagaaacctaagacggggtcgcccaccgcacccccgcccacagatccagtccccctggacacggaggacgactccgatgcggcggacgggacggcggcccgtcccgccgctccagacgcccggagcggaagccgttacgcgtgttactttcgcgacctcccgaccggagaagcaagccccggcgccttctccgccttccgggggggcccccaaaccccgtatggttttggattcccctgacggggcggggccttggcggccgcccaactctcgcaccatcccgggttaatgtaaataaacttggtattgcccaacactctcccgcgtgtcgcgtgtggttcatgtgtgtgcctggcgcccccaccctcgggttcgtgtatttcctttccctgtccttataaaagccgtatgtggggcgtgacggaaccaccccgcgtgccatcacggccaaggcgcgggatgctccgcaacgacagccaccgggccgcgtccccggaggacggccagggacgggtcgacgacggacggccacacctcgcgtgcgtgggggccctggcgcgggggttcatgcatatctggcttcaggccgccacgctgggttttgcgggatcggtcgttatgtcgcgcgggccgtacgcgaatgccgcgtctggggcgttcgccgtcgggtgcgccgtgctgggctttatgcgcgcaccccctcccctcgcgcggcccaccgcgcggatatacgcctggctcaaactggcggccggtggagcggcccttgttctgtggagtctcggggagcccggaacgcagccgggggccccgggcccggccacccagtgcctggcgctgggcgccgcctatgcggcgctcctggtgctcgccgatgacgtctatccgctctttctcctcgccccggggcccctgttcgtcggcaccctggggatggtcgtcggcgggctgacgatcggaggcagcgcgcgctactggtggatcggtgggcccgccgcggccgccttggccgcggcggtgttggcgggcccgggggcgaccaccgccagggactgcttctccagggcgtgccccgaccaccgccgcgtctgcgtcatcgtcgcaggcgagtctgtttcccgccgccccccggaggacccagagcgacccggggttcccgggcccccgtcccccccgaccccccaacgatcccacgggccgccggccgatgaggtcgcaccggccggggtagcgcggcccgaaaacgtctgggtgcccgtggtcacctttctgggggcgggcgcgctcgccgtcaagacggtgcgagaacatgcccgggaaacgccgggcccgggcctgccgctgtggccccaggtgtttctcggaggccatgtggcggtggccctgacggagctgtgtcaggcgcttatgccctgggaccttacggacccgctgctgtttgttcacgccggactgcaggtcatcaacctcgggttggtgtttcggttttccgaggttgtcgtgtatgcggcgctagggggtgccgtgtggatttcgttggcgcaggtgctggggctccggcgtcgcctgcacaggaaggaccccggggacggggcccggttggcggcgacgcttcggggcctcttcttctccgtgtacgcgctggggtttggggtgggggcgctgctgtgccctccggggtcaacgggcgggtggtcgggcgattgatatatttttcaataaaaggcattagtcccgaagaccgccggtgtgtgatgatttcgccataacacccaaaccccggatggggcccgggtataaattccggaaggggacacgggctaccctcactaccgagggcgcttggtcgggaggccgcatcgaacgcacacccccatccggtggtccgtgtggaggtcgtttttcagtgcccggtctcgctttgccgggaacgctagccgatccctcgcgagggggaggcgtcgggcatggccccggggcgggtgggccttgccgtggtcctgtggagcctgttgtggctcggggcgggggtggccgggggctcggaaactgcctccaccgggcccacgatcaccgcgggagcggtgacgaacgcgagcgaggcccccacatcggggtcccccgggtcagccgccagcccggaagtcacccccacatcgaccccaaaccccaacaatgtcacacaaaacaaaaccacccccaccgagccggccagccccccaacaacccccaagcccacctccacgcccaaaagcccccccacgtccacccccgaccccaaacccaagaacaacaccacccccgccaagtcgggccgccccactaaaccccccgggcccgtgtggtgcgaccgccgcgacccattggcccggtacggctcgcgggtgcagatccgatgccggtttcggaattccacccgcatggagttccgcctccagatatggcgttactccatgggtccgtcccccccaatcgctccggctcccgacctagaggaggtcctgacgaacatcaccgccccacccgggggactcctggtgtacgacagcgcccccaacctgacggacccccacgtgctctgggcggagggggccggcccgggcgccgaccctccgttgtattctgtcaccgggccgctgccgacccagcggctgattatcggcgaggtgacgcccgcgacccagggaatgtattacttggcctggggccggatggacagcccgcacgagtacgggacgtgggtgcgcgtccgcatgttccgccccccgtctctgaccctccagccccacgcggtgatggagggtcagccgttcaaggcgacgtgcacggccgccgcctactacccgcgtaaccccgtggagtttgtctggttcgaggacgaccgccaggtgtttaacccgggccagatcgacacgcagacgcacgagcaccccgacgggttcaccacagtctctaccgtgacctccgaggctgtcggcggccaggtccccccgcggaccttcacctgccagatgacgtggcaccgcgactccgtgatgttctcgcgacgcaatgccaccgggctggccctggtgctgccgcggccaaccatcaccatggaatttggggtccggcatgtggtctgcacggccggctgcgtccccgagggcgtgacgtttgcctggttcctgggggacgacccctcaccggcggctaagtcggccgttacggcccaggagtcgtgcgaccaccccgggctggctacggtccggtccaccctgcccatttcgtacgactacagcgagtacatctgtcggttgaccggatatccggccgggattcccgttctagagcaccacggcagtcaccagcccccacccagggaccccaccgagcggcaggtgatcgaggcgatcgagtgggtggggattggaatcggggttctcgcggcgggggtcctggtcgtaacggcaatcgtgtacgtcgtccgcacatcacagtcgcggcagcgtcatcggcggtaacgcgagacccccccgttacctttttaatatctatatagtttggtccccctctatcccgcccaccgctgggcgctataaagccgccaccctctcttccctcaggtcatccttggtcgatcccgaacgacacacggcgtggagcaaaacgcctccccctgagccgctttcctaccaacacaacggcatgcctctgcgggcatcggaacacgcctaccggcccctgggccccgggacaccccccatgcgggctcggctccccgccgcggcctgggttggcgtcgggaccatcatcgggggagttgtgatcattgccgcgttggtcctcgtgccctcgcgggcctcgtgggcactttccccatgcgacagcggatggcacgagttcaacctcgggtgcatatcctgggatccgacccccatggagcacgagcaggcggtcggcggctgtagcgccccggcgaccctgatcccccgcgcggctgccaaacagctggccgccgtcgcacgcgtccagtcggcaagatcctcgggctactggtgggtgagcggagacggcattcgggcctgcctgcggctcgtcgacggcgtcggcggtattgaccagttttgcgaggagcccgcccttcgcatatgctactatccccgcagtcccgggggctttgttcagtttgtaacttcgacccgcaacgcgctggggctgccgtgaggcgcgtgtactgcggtctgtctcgtctcctcttctccccttccctccccctccgcatcccaggatcacaccggccaacgagggttgggggggtccggcacggacccaaaataataaacacacaatcacgtgcgataaaaagaacacgcggtcccctgtggtgtttttggttatttttattaaatctcgtcgacaaacagggggaaaagggcgtggtctagcgacggcagcacgggcggaggcgttcaccggctccggcgtccttcgcgtttaagcttggtcaggagggcgctcagggcggcgacgttggtcgggccgtcgttggtcagggcgttggctcgatggcgggcgaggacgggcgaggggctcaacggcgggggcgggggtccggtgcggcccgggggggaaaatagggcggatcccccccagtcgtacaggggattttccgcctcaatgtacggggaggccggcgctgcattcgccgtgttcacgcagacgttttcgtagacccgcatccatggtatttcctcgtagacacgccccccgtcctcgctcacggtctcgtatattgactcgtcgtcctcgtagggggcgtgccgttcgcgggccgaggcggcgtgggtggctttgcggcgggcgtcgtcgtcgtcgtcgtcggccgtcagatacgtggcttccatctggtcgggttctccctccggggcgggtccccacacccgtggccgatcgaggctccccagagacgcgcgccggacaagaagggggcacgtcgccgccggcggtcgcctgtcgggtcccgcgacgttacgggccgggaggcgcgggggcacctcccccatgtgcgtgtaatacgtggccggctgtgcggccgcagcggggggctcggcgaccgggtcgtccgcatccggaagcgggggccccgcgccgtccgcacggcgcctccggaaccgccgggtggacggcgcgggggtcgagtgtaggcgaggtcgggggaggggcgggggctcgttgtcgcgccgcgcccgctgaatcttttcccgacaggtcccaccccccgcgcgatgcccccccgggccgcgggccatgtcgtccgggggaggccccgcggaccacgtcgtccggcgagacgccacgagccgcaggatggactcgtagtggagcgacggcgccccgctgcggagcagatccgcggccagggcggccccgaaccaagccttgatgctcaactccatccgggcccagctgggggcggtcatcgtggggaacaggggggcggtggtccgacagaaacgctcctggctgtccaccgcggcccgcagatactcgttgttcaggctgtcggtggcccagacgccgtacccggtgagggtcgcgttgatgatatactgggcgtggtgatggacgatcgacagaacctccaccgtggataccacggtatccacggtcccgtacgtaccgccgctccgcttgccggtctgccacaggttggctaggcacgtcaggtggcccaggacgtcgctgaccgccgccctgagcgccatgcactgcatggagccggtcgtgccgctgggaccccggtccagatggcgcgcgaacgtttccgcgggcgcctccgggctgccgccgagcgggaggaaccggcgattggagggactcagccggtgacatacgtgcttgtccatcgtccacagcatccaggacgcccaccggtacagcacggagacgtaggccaggagctcgttgagccgcagtgcggtgtcggtgctggggcggcttgggtccgccgggcgcataaagaacatgtactgctgaatccgatggagggcgtcgcgcaggccggccacggtggcggcgtacttggccgccgcggccccgctcttgaacggggtgcgcgccagcagctttggcgccagggtgggccgcagcagcacgtgaaggctggggtcgcagtcgcccacggggtcctcggggacgtccaggccgctgggcaccaccgtctgcaggtacttccagtactgcgtgaggatggcgcggctcaactggccgccgggcagctccacctcgcccagcgcctgggtggcggccgaagcgtagtgccggatgtactcgtagtgcgggtcgctggcgagcccgtccacgatcaaactctcgggaaccgtgttgtgttgccgcgcggccaaccggacgctgcgatcggtgcaggtcagaaacgccggctgcgcgtcgtcggagcgctgccgcaaggcgcccacggccgcgctaaggagcccctccggggtggggagcagacacccgccgaagatgcgccgctcgggaacgcccgcgttgtcgccgcggatcaggttggcaggcgtcaggcaccgcgccagccgcagggagctcgcgccgcgcgtccggcgctgcatggtgacgcccgttcggtcgggacccgccggtcggagttatgccgcgtccagggccatcggggcgctttttatcgggaggagcttatgggcgtggcgggcctcccagcccggtcgcgcgcctccccgacacgtgcgcccgcagggcggcggccccctcgtctcccatcagcagtttcctaaactgggacatgatgtccaccacgcggacccgcgggcccaacacggacccgccgcttacgggggcgggggggaagggctccaggtccttgagcagaaaggcggggtctgccgtcccggacacgggggcccggggcgcggaggaggcggggcgcagatccacgtgctccgcggccgcgcggacgtccgcccagaacttggcgggggtggtgcgcgcgtacaggggctgggtcgctcggaggacacacgcgtagcgcaggggggtgtacgtgcccacctcgggggccgtgaatcccccgtcaaacgcggccagtgtcacgcacgccaccacggtgtcggcaaagcccagcagccgctgcaggacgagcccggcggccagaatggcgcgcgtggtcgcagcgtcgtcccggcgccggtgcgcgtccccgcacgcccgggcgtactttaaggtcactgtcgccagggccgtgtgcagcgcgtacaccgcagcgcccagcacggcgttgagcccgctgttggcgagcagccggcgcgctgcggtgtcgcccagcgcctcgtgctcggcccccacgaccgcggggcttcccaggggcagggcgcgaaacagctcctcccgcgccacgtccgcaaaggcggggtggtgcacgtgcgggtgcaggcgcgcccccacgaccaccgagagccactggaccgtctgctccgccatcaccgccaacacatccagcacgcgccccaggaaggcggcctcccgcgtcaaaacgcaccggacggcgtcgggattgaagcgggcgagcagggccccggtggccaggtacgtcatgcggccggcatagcgggcggccacgcgacagtcgcggtccagcagcgcgcgcaccccgggccagtacagcagggaccccagcgagctgcgaaacaccgcggcgtcggggccggattggggggacactaacccccccgcgctcagtaacggcacggccgcggccccgacgggacgcaacgccgtgaggctcgcgaactgccgcctcagctcggcagccctgtcgtccaggtccgacccgcgcgcctctgcgtgaaggcgcgtcccgcacacccacccgttgatggccagccgcacgacggcatccgccaaaaagctcatcgcctgggcggggctggtttttgttcgacgatccgtcaggtcaagaatcccatcgcccgtgatataccaggccaacgcctcgccctgctgcagggtttggcggaaaaacaccgcggggttgtcgggggaggcgaagtgcatgacccccacgcgcgataacccgaacgcgctatccggacacgggtaaaacccggccggatgccccagggctagggcggagcgcacggactcgtcccacacggcaacctgaggggccagtcgatccaacgggaatgccgcccggagctccgggcccggcacgcgtccctccagaacctccaccttgggcggggaacgggccccgccgccgtcctccggcccgacgtcttccgggtagtcgtcctcctcgtactgcagttcctctaggaacagcggcgacggcgccacccgcgaaccgccgacccgccccaaaatagcccgcgcgtcgacgggacccaggtatcccccctgccgggcctgcggaggaccgcggggaacctcatcatcatcgtccaggcgaccgcgcaccgactggctacgggccgcatcgggcccggggcgctgccgggacgctcggcgatgggatgagggcggggcttccgacgcgcgccgtcgtcgggctcgcgggccttcccgtcgacggcgcacgggcggctcgtcgcccgccatctcctccagagcctctagctcgctgtcgtcatccccgcggaacaccgcacgcaggtaccccatgaaccccaccccatcgcccgctggctcgtccgccacgggcgaggcgcgggggcgggtggatgcgcgcctcctgcgccccgcgggttcgcgagccgacatggtggcgatagacgcgggttatcggatgtccgctaccccccaaaaaagaaaaagaccccacagcgcggatggaggtcggggtaggtgccgccggaccccctcgcgatgggaatggacgggagcgacggggccggcgcaaaaaacgcagtatctcccgcgaaggctacccgccgccccagcccccggccaaatgcggaaacggtcccgcgctctcgcctttatacgcgggccgccctgcgacacaatcacccgtccgtggtttcgaatctacacgacaggcccgcagacgcggctaacacacacgccggcaacccagaccccagtgggttggttgcgcggtcccgtctcctggctagttctttcccccaccaccaaataatcagacgacaaccgcaggtttttgtaatgtatgtgctcgtgtttattgtggatacgaaccggggacgggaggggaaaacccagacgggggatgcgggtccggtcgcgccccctacccaccgtactcgtcaattccaagggcatcggtaaacatctgctcaaactcgaagtcggccatatccagagcgccgtagggggcggagtcgtggggggtaaatcccggacccggggaatccccgtcccccaacatgtccagatcgaaatcgtctagcgcgtcggcatgcgccatcgccacgtcctcgccgtctaagtggagctcgtcccccaggctgacatcggtcgggggggccgtcgacagtctgcgcgtgtgtcccgcggggagaaaggacaggcgcggagccgccagccccgcctcttcgggggcgtcgtcgtccgggagatcgagcaggccctcgatggtagacccgtaattgtttttcgtacgcgcgcggctgtacgcgtgttcccgcatgaccgcctcggagggcgaggtcgtgaagctggaatacgagtccaacttcgcccgaatcaacaccataaagtacccagaggcgcgggcctggttgccatgcagggtgggaggggtcgtcaacggcgcccctggctcctccgtagccgcgctgcgcaccagcgggaggttaaggtgctcgcgaatgtggtttagctcccgcagccggcgggcctcgattggcactccccggacggtgagcgctccgttgacgaacatgaagggctggaacagacccgccaactgacgccagctctccaggtcgcaacagaggcagtcaaacaggtcgggccgcatcatctgctcggcgtacgcggcccataggatctcgcgggtcaaaaatagatacaaatgcaaaaacagaacacgcgccagacgagcggtctctcggtagtacctgtccgcgatcgtggcgcgcagcatttctcccaggtcgcgatcgcgtccgcgcatgtgcgcctggcggtgcagctgccggacgctggcgcgcaggtaccggtacagggccgagcagaagttggccaacacggttcgatagctctcctcccgcgcccgtagctcggcgtggaagaaacgagagagcgcttcgtagtagagcccgaggccgtcgcgggtggccggaagcgtcgggaaggccacgtcgccgtgggcgcgaatgtcgatttgggcgcgttcggggacgtacgcgtccccccattccaccacatcgctgggcagcgttgataggaatttacactcccggtacaggtcggcgttggtcggtaacgccgaaaacaaatcctcgttccaggtatcgagcatggtacatagcgcggggcccgcgctaaagcccaagtcgtcgaggagacggttaaagagggcggcgggggggacgggcatgggcggggagggcatgagctgggcctggctcaggcgccccgttgcgtacagcggaggggccgccggggtgtttttgggacccccggccgggcgggggggtggtggcgaagcgccgtccgcgtccatgtcggcaaacagctcgtcgaccaagaggtccattgggtggggttgatacgggaaagacgatatcgggcttttgatgcgatcgtccccgcccgcccagagagtgtgggacgcccgacggcgcgggaagagaaaaacccccaaacgcgttagaggaccggacggaccttatggggggaagtgggcagcgggaaccccgtccgttcccgaggaatgacagcccgtggtcgccaccccgcatttaagcaacccgcacgggccgccccgtacctcgtgacttccccccacattggctcctgtcacgtgaaggcaaaccgagggcggctgtccaacccaccccccgccacccagtcacggtccccgtcggattgggaaacaaaggcacgcaacgccaacaccgaatgaacccctgttggtgctttattgtctgggtacggaagtttttcactcgacgggccgtctggggcgagaagcggagcgggctggggctcgaggtcgctcggtggggcgcgacgccgcagaacgccctcgagtcgccgtggccgcgtcgacgtcctgcaccacgtctggattcaccaactcgttggcgcgctgaatcaggtttttgccctcgcagaccgtcacgcggatggtggtgatgccaaggagttcgttgaggtcttcgtctgtgcgcggacgcgacatgtcccagagctggaccgccgccatccgggcatgcatggccgccaggcgcccaaccgcggcgcagaagacgcgcttgttaaagccggccacccggggggtccatggcgcgtcggggtttgggggggcggtgctaaagtgcagctttctggccagcccctgcgcgggtgtcttggatcgggttggcgccgtcgacgcgggggcgtctgggagtgcggcggattctggctgggccgatttcctgccgcgggtggtctccgccgccggggccgcgggggccttagtcgccacccgctgggttcggggggcccggggggcggtggtgggtgtgcgtccggcccctccggacccagcgggcggcggaggcgcccgcgcaggccccggggcggacaaaaccgccccggaaacgggacgccgcgtccgggggacctccgggtgttcgtcgtcttcggatgacgagcccccgtagagggcataatccgactcgtcgtactggacgaaacggacctcgccccttgggcgcgcgcgtgtctgtagggcgccacggcgggaggtgtcaggcggactatcgggactcgccatacatgaagacggggtgtagtacagatcctcgtactcatcgcgcggaacctcccgcggacccgacttcacggagcggcgagaggtcatggttccacgaacacgctagggtcggatgcgcggacaattaggcctgggttcggacggcgggggtggtgcaggtgtggagaggtcgagcgataggggcggcccgggagagaagagagggtccgcaaaacccactggggatgcgtgagtggccctctgtgggcggtgggggagagtcttataggaagtgcatataaccacaacccatgggtctaaccaatccccaggggccaagaaacagacacgccccaaacggtctcggtttccgcgaggaaggggaagtcctgggacaccctccacccccacccctcaccccacacagggcgggttcaggcgtgcccggcagccagtagcctctggcagatctgacagacgtgtgcgataatacacacgcccatcgaggccatgcctacataaaagggcaccagggcccccggggcagacatttggccagcgttttgggtctcgcaccgcgcgcccccgatcccatcgcgcccgccctcctcgccgggcggctccccgtgcgggcccgcgtctcccgccgctaaggcgacgagcaagacaaacaacaggcccgcccgacagacccttctgggggggcccatcgtccctaacaggaagatgagtcagtggggatccggggcgatccttgtccagccggacagcttgggtcgggggtacgatggcgactggcacacggccgtcgctactcgcgggggcggagtcgtgcaactgaacctggtcaacaggcgcgcggtggcttttatgccgaaggtcagcggggactccggatgggccgtcgggcgcgtctctctggacctgcgaatggctatgccggctgacttttgtgcgattattcacgcccccgcgctatccagcccagggcaccacgtaatactgggtcttatcgactcggggtaccgcggaaccgttatggccgtggtcgtagcgcctaaaaggacgcgggaatttgcccccgggaccctgcgggtcgacgtgacgttcctggacatcctggcgacccccccggccctcaccgagccgatttccctgcggcagttcccgcaactggcgcccccccctccaaccggggccgggatacgcgcagatccttggttggagggggcgctcggggacccaagcgtgactcctgccctaccggcgcgacgccgagggcggtccctcgtctatgccggcgagctgacgccggttcagacggaacacggggacggcgtacgagaagccatcgccttccttccaaaacgcgaggaggatgccggtttcgacattgtcgtccgtcgcccggtcaccgtcccggcaaacggcaccacggtcgtgcagccatccctccgcatgctccacgcggacgccgggcccgcggcctgctatgtgctggggcggtcgtcgctcaacgcccgcggcctcctggtcgttcctacgcgctggctccccgggcacgtatgtgcgtttgttgtttacaaccttacgggggttcctgtgaccctcgaggccggcgccaaggtcgcccagctcctggttgcgggggcggacgctcttccttggatccccccggacaactttcacgggaccaaagcgcttcgaaactaccccaggggtgttccggactcaaccgccgaacccaggaacccgccgctcctggtgtttacgaacgagtttgacgcggaggcccccccgagcgagcgcgggaccgggggttttggctctaccggtatttagcccatagcttggggttcgttccgggcaataaaaaacgtttgtatctcatctttcctgtgtgtagttgtttctgttggatgcctgtgggtctatcacacccgcccctccatcccacaaacacagaacacacgggttggatgaaaacacgcatttattgacccaaaacacacggagctgctcgagatgggccagggcgaggtgcggttggggaggctgtaggtctgggaacggacacgcggggacacgattccggtttggggtccgggagggcgtcgccgtttcgggcggcaggcgccagcgtaacctccgggggcggcgtgtgggggtgccccaaggagggcgcctcggtcaccccaagcccccccgagcgggttcccccggcaaccccgaaggcggagaggccaagggcccgttcggcgatggccacatcctccatgaccacgtcgctctcggccatgctccgaatagcctgggagacgagcacatccgcggacttgtcagccgcccccacggacatgtacatctgcaggatggtggccatacacgtgtccgccaggcgccgcatcttgtcctgatgggccgccacggccccgtcgatcgtgggggcctcgagcccggggtggtggcgcgccagtcgttctaggttcaccatgcaggcgtggtacgtgcgggccaaggcgcgggccttcacgaggcgtcgggtgtcgtccagggaccccagggcgtcatcgagcgtgatgggggcgggaagtagcgcgttaacgaccaccagggcctcctgcagccgcggctccgcctccgagggcggaacggccgcgcggatcatctcatattgttcctcggggcgcgctccccagccacatatagccccgagaagagaagccatcgcgggcgggtactggcccttgggcgcgcggacgcaatggggcaggaagacgggaaccgcggggagaggcgggcggccgggactcccgtggaggtgaccgcgctttatgcgaccgacgggtgcgttattacctcttcgatcgccctcctcacaaactctctactgggggccgagccggtttatatattcagctacgacgcatacacgcacgatggccgtgccgacgggcccacggagcaagacaggttcgaagagagtcgggcgctctaccaagcgtcgggcgggctaaatggcgactccttccgagtaaccttttgtttattggggacggaagtgggtgggacccaccaggcccgcgggcgaacccgacccatgttcgtctgtcgcttcgagcgagcggacgacgtcgccgcgctacaggacgccctggcgcacgggaccccgctacaaccggaccacatcgccgccaccctggacgcggaggccacgttcgcgctgcatgcgaacatgatcctggctctcaccgtggccgtcaacaacgccagcccccgcaccggacgcgacgccgccgcggcgcagtatgatcagggcgcgtccctacgctcgctcgtggggcgcacgtccctgggacaacgcggccttaccacgctatacgtccaccacgaggcgcgcgtgctggccgcgtaccgcagggcgtattatggaagcgcgcagagtcccttctggtttcttagcaaattcgggcctgacgaaaaaagcctggtgctcaccactcggtactacctgcttcaggcccagcgtctggggggcgcgggggccacgtacgacctgcaggccatcaaggacatctgcgccacctacgcgattccccacgccccccgccccgacaccgtcagcgccgcgtccctgacctcgtttgccgccatcacgcggttctgttgcacgagccagtacgcccgcggggccgcggcggccgggtttccgctttacgtggagcgccgtattgcggccgacgtccgcgagaccagtgcgctggagaagttcataacccacgatcgcagttgcctgcgcgtgtccgaccgtgaattcattacgtacatttacctggcccattttgagtgtttcagccccccgcgcctagccacgcatcttcgggccgtgacgacccaggaccccaaccccgcggccaacacggagcagccctcgcccctgggcagggaggccgtggaacaatttttttgccacgtgcgcgcccaactgaatatcggggagtacgtcaaacacaacgtgaccccccgggagaccgtcctggatggcgatacggccaaggcctacctgcgcgctcgcacgtacgcgcccggggccctgacgcccgcccccgcgtattgcggggccgtggactccgccaccaaaatgatggggcgtttggcggacgccgaaaagctcctggtcccccgcgggtggcccgcgtttgcgcccgccagtcccggggaggatacggcgggcggcacgccgcccccacagacctgcggaatcgtcaagcgcctcctgagactggccgccacggaacaacaggacaccacgcccccggcgatcgcggcgcttatccgtaatgcggcggtgcagactcccctgcccgtctaccggatatccatggtccccacgggacaggcatttgccgcgctggcctgggacgactgggcccgcataacgcgggacgctcgcctggccgaagcggtcgtgtccgccgaagcggcggcgcaccccgaccacggcgcgctgggcaggcggctcacggatcgcatccgcgcccagggccccgtgatgccccctggcggcctggatgccggggggcagatgtacgtgaatcgcaacgagatatttaacggcgcgctggcaatcacaaacatcatcctggatctcgacatcgccctgaaggagcccgtcccctttcgccggctccacgaggccctgggccactttaggcgcggggctctggcggcggttcagctcctgtttcccgcggcccgcgtggaccccgacgcatatccctgttattttttcaaaagcgcatgtcggcccggcccggcgtccgtgggttccggcagcggactcggcaacgacgacgacggggactggtttccctgctacgacgacgccggtgatgaggagtgggcggaggacccgggcgccatggacacatcccacgatcccccggacgacgaggttgcctactttgacctgtgccacgaagtcggccccacggcggaacctcgcgaaacggattcgcccgtgtgttcctgcaccgacaagatcggactgcgggtgtgcatgcccgtccccgccccgtacgtcgtccacggttctctaacgatgcggggggtggcacgggtcatccagcaggcggtgctgttggaccgagattttgtggaggccatcgggagctacgtaaaaaacttcctgttgatcgatacgggggtgtacgcccacggccacagcctgcgcttgccgtattttgccaaaatcgcccccgacgggcctgcgtgcggaaggctgctgccagtgtttgtgatcccccccgcctgcaaagacgttccggcgtttgtcgccgcgcacgccgacccgcggcgcttccattttcacgccccgcccacctatctcgcttccccccgggagatccgtgtcctgcacagcctgggtggggactatgtgagcttctttgaaaggaaggcgtcccgcaacgcgctggaacactttgggcgacgcgagaccctgacggaggtcctgggtcggtacaacgtacagccggatgcgggggggaccgtcgaggggttcgcatcggaactgctggggcggatagtcgcgtgcatcgaaacccactttcccgaacacgccggcgaatatcaggccgtatccgtccggcgggccgtcagtaaggacgactgggtcctcctacagctagtccccgttcgcggtaccctgcagcaaagcctgtcgtgtctgcgctttaagcacggccgggcgagtcgcgccacggcgcggacattcgtcgcgctgagcgtcggggccaacaaccgcctgtgcgtgtccttgtgtcagcagtgctttgccgccaaatgcgacagcaaccgcctgcacacgctgtttaccattgacgccggcacgccatgctcgccgtccgttccctgcagcacctctcaaccgtcgtcttgataacggcgtacggcctcgtgctcgtgtggtacaccgtcttcggtgccagtccgctgcaccgatgtatttacgcggtacgccccaccggcaccaacaacgacaccgccctcgtgtggatgaaaatgaaccagaccctattgtttctgggggccccgacgcacccccccaacgggggctggcgcaaccacgcccatatctgctacgccaatcttatcgcgggtagggtcgtgcccttccaggtcccacccgacgccacgaatcgtcggatcatgaacgtccacgaggcagttaactgtctggagaccctatggtacacacgggtgcgtctggtggtcgtagggtggttcctgtatctggcgttcgtcgccctccaccaacgccgatgtatgtttggtgtcgtgagtcccgcccacaagatggtggccccggccacctacctcttgaactacgcaggccgcatcgtatcgagcgtgttcctgcagtacccctacacgaaaattacccgcctgctctgcgagctgtcggttcagcggcaaaacctggttcagttgtttgagacggacccggtcaccttcttgtaccaccgccccgccatcggggtcatcgtaggctgcgagttgatgctacgctttgtggccgtgggtctcatcgtcggcaccgctttcatatcccggggggcatgtgcgatcacataccccctgtttctgaccatcaccacctggtgttttgtctccaccatcggcctgacagagctgtattgtattctgcggcggggcccggcccccaagaacgcagacaaggccgccgccccggggcgatccaaggggctgtcgggcgtctgcgggcgctgttgttccatcatcctgtcgggcatcgcaatgcgattgtgttatatcgccgtggtggccggggtggtgctcgtggcgcttcactacgagcaggagatccagaggcgcctgtttgatgtatgacgtcacatccaggccggcggaaaccggaacggcatatgcaaactggaaactgtcctgtcttggggcccacccacccgacgcgtcatatgtaaatgaaaatcgttcccccgaggccatgtgtagcctggatcccggacctggttaaccacccgccggtcctacgcgaactggaggataagcgcggggtgcggctgcggtgtgcgcggccgtttagcgtcgggacgattaaggacgtctctgggtccggcgcgtcctcggcgggagagtacacgataaacgggatcgtgtaccactgccactgtcggtatccgttctcaaaaacatgctggatgggggcctccgcggccctacagcacctgcgctccatcagctccagcggcatggccgcccgcgcggcagagcatcgacgcgtcaagattaaaattaaggcgtgatctccaaccccccatgaatgtgtgtaaccccccccccaaaaaaataaagagccgtaacccaaccaaaccaggcgtggtgtgagtttgtggacccaaagccctcagagacaatgcgacaggccagtatggaccgtgatacttttatttattaactcacaggggcgcttaccgccacaggaataccagaataatgaccaccacaatcgcgaccaccccaaatacagcatggcgccacaccacgccacaacagccctgtcgccggtatggggcatgatcagacgagccgcgcgccgcgcgttgggccctgtacagctcgcgcgaattgaccctaggaggccgccacgcgcccgagttttgcgttcgtcgctggtcgtcgggcgccaaagccccggacggctgttcggtcgaacgaacggccacgacagtggcataggttggggggtggtccgacatagcctcggcgtacgtcgggaggcccgacaagaggtcccttgtgatgtcgggtggggccacaagcctggtttccggaagaaacaggggggttgccaataacccgccagggccaaaactccggcgctgcgcacgtcgttcggcgcggcgccgggcgcgccgagcggctcgctgggcggcttggcgtgagcggccccgctccgacgcctcgccctctccggaggaggttggcggaattggcacggacgacaggggcccagcagagtacggtggaggtgggtccgtgggggtgtccagatcaataacgacaaacggcccctcgttcctaccagacaagctatcgtaggggggcgggggatcagcaaacgcgttccccgcgctccatagacccgcgtcgggttgcgccgcctccgaagccatggatgcgccccaaagccacgactcccgcgcgctaggtccttggggtaagggaaaaggccctactccccatccaagccagccaagttaacgggctacgccttcggggatgggactggcaccccggcggattttgttgggctggtacgcgtcgcccaaccgagggccgcgtccacgggacgcgccttttataaccccgggggtcattcccaacgatcacatgcaatctaactggctgggccctggaaatggcggacaccttcctggacaacatgcgggttgggcccaggacgtacgccgacgtacgcgatgagatcaataaaagggggcgtgaggaccgggaggcggccagaaccgccgtgcacgacccggagcgtcccctgctgcgctctcccgggctgctgcccgaaatcgcccccaacgcatccttgggtgtggcacatcgaagaaccggcgggaccgtgaccgacagtccccgtaatccggtaacccgttgagtcccgggtacgaccatcacccgagtctctgggcggagggtggttcccccccgtgtctctcgagatgagccagacccaacccccggccccagttgggccgggcgacccagatgtttacttaaaaggcgtgccgtccgccggcatgcaccccagaggtgttcacgcacctcgaggacacccgcgcatgatctccggacccccgcaacggggtgataatgatcaagcggcggggcaatgtggagattcgggtctactacgagtcggtgcggacactacgatctcgaagccatctgaagccgtccgaccgccaacaatccccaggacaccgcgtgttccccgggagccccgggttccgcgaccaccccgagaacctagggaacccagagtaccgcgagctcccagagaccccagggtaccgcgtgaccccagggatccacgacaaccccggtctcccagggagccccggaccccacgcaccccccgcgaaccacgtacggctcgcgggtctgtatagcccgggcaagtatgcccccctggcgagcccagaccccttctccccacaagatggagcatacgctcgggcccgcgtcgggatccacaccgcggttcgcgtcccgcccaccggaagcccaacccacacgcacttgcggcaagacccgggcgatgagccaacctcggatgactcagggctctaccctctggacgcccgggcgcttgcgcacctggtgatgttgcccgcggaccaccgggccttctttcgaaccgtggtcgaggtgtctcgcatgtgcgctgcaaacgtgcgcgatcccccgcccccggctacaggggccatgttgggccgccacgcgcggctggtccacacccagtggctccgggccaaccaagagacgtcgcccctgtggccctggcggacggcggccattaactttatcaccaccatgaccccccgcgtccaaacccaccgacacatgcacgacctgttgatggcctgtgctttctggtgctgtctgacacacgcatcgacgtgttcgtacgcggggctgtactcgacccactgcctgcatctgtttggtgcgtttgggtgtggggacccggccctaaccccacccctgtgctagggcaatttgtacccttaataaattttacaaacagattttatcgcatcgtgtcttattgcgggggagaaaaccgatgtcggcatagaaaaccgccatgattctaagacgtccgaacgcgagtgggtggggaacaacccataccggacagatgccgatgagccacccgcacccttgggtgcgggaggtacggggtggtttgttcatcctatggttccgaccccacaaacagcccccagagtcggtttgggtatggttacattttctgtctggtggtcgggcttgtttcttccttgccactccccacccacccactccccacccacccactccccacccacccactccccacccacccactccccacccacccactccccacccacccactccccacccacccactccccacccacccactccccacccacccactccccacccacccactccccacccacccactccccacccacccaaaaatcaaccgggagacaacattgccaatcgaacccaatttaatgtagttaaaggctgggtgcaaattgcggggtgatgggggggaagagagacgacaagaaggacgcgcgtgtcgatgcggtcttttagcggagcagccacatcaggagcgccccaaatccgcccgacagaacggccacgaggagacaggcgatcaccatgccgacgcagcgggtgcgtctgcgtcaacgccttaataccgactgttggcggcccatgcgtacgaggaagtcgttggccgcctcgtcttcgctttccgagtagtaggcttcgaccgaaactggcgaggccgtgggataaagcggcacggacatgtcggatcgcgctgaggagttgggatcggagagccgggacgtcatcgaggccggaagaaagctccgggtgggaagttgcggtcgctgtgactcacgatttttaatttgctgcggctaggcggaccaccggccctttgtgcgcctcgggcaattgacgtcacataccacgcaatcccacacaggacggcccccaggccggaagccccccggagccaccgagcggccagccaggcgacaaacagggagggggcgtcgacagcctggagggccatcggggagacaacggccgtgtagcccgggggtcgcgggtgtggcgagggcgcggtcgacgtggcgaggggcgggcggtcatgtcgggggggtccgcgttcgtcggaaatcgcgattagctcgtctccgacgtccacctcgccggcggtcgcccagttcggcgaccgacgtggggcctcgggatggggcgccttaccagaagacggacgaatcggaggcctgggagtaacggcgatcgggccttccggatccaaaggttgtgagctggcggcgagattgatgcccgtcgctacgggggtatacagacggagccgttggtgataagatctcaaagccggatccattggtggagggagagtcgggtctctccgggggggccagccacgggacctggtcgcgttctccctcgctgtccgagctccagtccgcgtacagctcgctgtcggccacgcgaatgtacgtgggccccttacccgaggccctgcttttaaccgcccgccaggcacgcctgcgccaacaggtcatacacgcccacaccgacaaccccagcgcagacagcagcagggcggcccccatcaccgcccctaaccgcagggcgccgtgggttgggggcgcgtggggaggggccccgacgtgcgggtgggtgggctcggccaaatccgcgccgcgctgtgggaggggctgttccaccaccgcgttccggtactgcgccgcggtgctgatggtaatgtggccccaggcgtgaatatggtcgttgacgtacaccacacacagatacaggccggagtgttgtggggacgcgtcccggaactccagattgacggaggccgcctgccacgccagccccgggacgggctccatgtgagcctcggccgaacagcgcggtggggggtttgttctggaacaccccgcgtagctgcggacggccaggcgagacgtccacgtactcgcggcgcacggcgcgtcggccggggacagacattctgggagctgcgggtgatacagacacgattcgtatattcgcatctcggcacacgaggtcggcacgtcgaacctcaaccagacgacgtccatggagtaggtctggtcgtcgtgggcgatggcatggatggagacgttcgtgctgaacgtctccccgggggaaaacaggatagcttccggagtctccatacgcacggtcaccccacgcacatgtgagacttcgggggcgctgggccaagacctcgggggggcggggggaggcgggagccggggggtcccgctggcgggagtgccggcgagactttcgtcctcgccctcgtcattgtcatcctcgtcgtaatcggctggggtcgggggtggggtcggaactggggccggttgcaccaccaggaccaccgaggccacttggcgagccgggtcctttatgtcgcccacggacagggtatacaggccgctgtccgtctctcggaccccgtgaataaccagactccggttaaccacggccgcgcgctcctgccacacgaagtccgttcgtagacccccggtcgcagatggggccgggggggcgtacgccatcgccagcgggaccggagcgcgcatgcacgccgcatccacgaccgtctcgggcacctgcttggggggcatcagcgagacccacgacgggtgtaaggggccgcacccatccaggggttccacggcccatagtagtttctgggtcgggccgcgccccgtaggccccggagctggaagcaacgaaacgtcctcgccgacactcacccgtctccaggacgttttgggcgttcccgccaagcacgatacaacacaaacaccgagaagaaaccccaccaccgccccgcgatccatgtcccggggatagcagccgatcttcgggtaaaatgggagcccaacaaacagcaccgcaccaacccgccagaagagccaaagtcaacacaacaacgccttaaatgcgccgcgggccctctccccggcttcctgaactcctcccatccattctttgcttccttctttggtttccggggggggggggggaagaaagaaatggacatacacggatataggtaaataataccggtttattcccaactcagtgactgcggtcggttatgtggtgcccccggccagtggccgtggacctataccaacaggggaggcgttggggtggatgtcgtggggtccacggggggcgtcggaagcccagccgcccccgcgggctccgactcttcggcgatggccgtcagggagggcattggcgtgcgtgacgaccggcgccgggatttggggggggtgctcggatgcgatttgagctcggctccgaggcgggccatggccgcttcgttcaccgcgcatgagatgcccgtgggtatctgggggctgtaaatcgggcggcgggagcgtcggtagcggcgttgacatctgtgtataaagcaaatacagctccccagaaacaccagggctataatggacgcggggatggctatctggattatctgggtcaccgttagcgcatatcgcgagtcgcgggtcgctcgcgtggcattcgatgggggttcgtggttgaccccgtgaggttggggttttgggtctcccgtggggaagggtgtggtcgatgcttggggagcggggatggtggtcgagggggtggaggtggtggtcgagggggtggaggccgggttaggggcgggttggtatacgttcgccggggccagacgcggggccgaagacggaagcagtttcgggtcgcaggagccatgggccgagccgttgtacgccagagtaccttcggcggctatggccatccccaggacaaacaggctggcgtttggtgcgtccccgacccatacgcgtaacacgtacaccccggcatagtcacgcgtcgccctccggacccgcaaaagcggctgttgggccagattcagctccagggtgggatatgcggggctgtgagtgctgtcggtcgcgcgacacagggcaaatgccacggcggggcgacgtgggcacgcggtcaccgtgacgacatgcacgacccgtgggcatttgtgtcccatggggtagtgccacagctctacgcccccatcgtagtaggtggtgtgggggacctggtcccccacaaagcgaagctccccgagaataagcaggtcttcctccactacgccgtcgggccccaaggccccggcgtccacaaatgagtttgataccagactgaccgtggggccacggacaaccaggctggtggcacagacccagaggcccacgagcaccaggccctgcaacgggcggcacggcatcccgaaacgggacggttcgcaaaaaagctgtgggtgcgacaggcggaacaggtgcgcgtcccccgctaccgacttatcgactgtccgcctttccccccttccagactcgctttatatggagttaaggtcccatcccaaccccgcagacctgacccccccgcacccattaagggggggtatctagtaaaacaagggctggtgcgaggacggctggtcgtcttcccggatgtgggggaggcgtatgcgctttggggctttccgagtgcggcggtgcatccagtacacaattccgcaaatgaccagggctgccaggagactgccgcccaccgcgccggcgatcaggcccatgttgttcggggtggccgggggatggtaaggcgtcgcggcgtcctggatcgacgggatgtgccagtttggtgggatttgcggcgccaccgtccccacggggtcctccaagagggccgaatcctcggggtcttccggggcgagttctggctgcgtggcgttgggggtctcggacagctccgggggcagcagggtgctcgtgtatggggccttgggcccgtgccacccggcgatcttcaagctgtatacggcgacggtgcgctggttctcggggatgaagcggggcagcatcccgatgctgtccaccgtcaccccctgctggtaggcctggggggagaggcaggctgacggggggatgcgcagcgggagggcgtacttacaggagcccttggctcggtgctccaggataaactgtgtaatctccgtccagtcgtttatcttcacgagccgcaggtacgtgccggcggtctcaaacgcgggggcgtgcatcaggaaccccaggttatcctcgctgacggcgctgaagctgtcatagtagttccagcggggctgcgttcggatgggacaggcccccagagacttgttgtaggagcattcggtgtactccatgaccgtgatggggatagcacagttgcctcccatccgaaaccaagcgatggtcaggttgtagggttgtttccggacgtcttcggaggccccgcggacaatctggggggcctccgacggtgcgtttaggagcacgctgcggcaggcgcgctccaacacggcgtagtaaaccgtgatcgggaggctggggggctggaacgggtccggtaggcccgcctggatgtggtacacgcgccggacccccggagggtcggtcagctggtccaggaccggaaggtctttgccgcgaaagcgattggggtcggccatcttgagagaggcatccgccaaggcatatttgccgcggaccccatggaggcccactatgacgacaaacaaaatcacggcccccaacctggcggcagccccccccataccggaacgcaccacacaaaagagaccttaaggataactgatgatcggggtagttggtcgttcgcactgaagcttatgaccgaacaactccctaacccctgctttttaaagacagactttgttatacccctcctcctcgtaaaatggcccctcccccttaggggattcgtcggtgtggtcggtatggacgataatgtcacacggccgggctaccgcgatctttgttgggggccggggccacggatttcctggttagcccggtgttgttgggtgccctccgcattcgccccccatccccctgccggacatggtttggggggcgcaccggtgatttataccatgccagctggtggtgtcgggagtttggacccgacatcacccatgcggagaagggggggggggaaaaaattatacgacaactgggtccatgtagggatggtaacgcccccacccgcggcacgtacgacgcaggagctcaagcagacacgccgcccccaggactacggcacacagcccaccgactacgagggggacggcaaagccccccagggggctggggtgaggggacactggggcgtgcgttaaggggtccgttgtgttggccgcaggtcccagatgggtggcggcaagaacagcccccacgaggcttcccaaaagccccagatgccagactgcgcgcagagacatcgcgacacacagaacgccaagtcgtgtgctgtttctccggatagccaggcctggctcagacgtccgttggccgtttcgggtgggttccgaggcccggaagtcgcgcatgcttcatgggtcccgggcatgtatttaactgcacccccgtccaatgaccgccccgcgcccaccacaccccaaaaacacccagagacgcatatcaactagatcccgccgcctttattgttcttgctttccgcgtgtgggctctccccatccccgccccataccctacccgcgttcgggcggcaggcacacgtaacgcacgctagggtgtgtgcgtcgcccgcgtctggaccaaccaccacacaggtgtgtcgccatagcaacaatacacacaaacgataaggtgtggatgacggtgctgacgacgaagagggtgtccagggcgggggaggcagtgaggaacgagaacagcggggtatgttgaggcgtcggaaccaagggtcgcccctttgaggggagttgggtcgtgggtcgagttgccagcggcccgatactggtggggggtgtcttcggtcgactggtctcggggcgcgcgggggagttgttgggaccggggggtgggactacgggacggttgggtttgtccttctcgtcatccccggccaacgggacggctggacccggggactggggtagggtgtcacgggtcccatctccccccttaagatgttcgccatccccggccccctcctcctcttcctcctcctcctccagtccgatacttggcatggggggtgtgtggtcgggcgtggtaaggctgatggcggtgggagagtcggtggtgccggtctgggtcatgttgggggcttcatgcgagggacgaccggtggtctggagttggggttgggtggtggaggagacgttggtgggaacccccgatacaccgacaagaaccaaaaggaatgggataatgggaacaacggcacgcatggcgcccggcgacatgatgccaaaaacaccacagacgcgggtcggggtctttttgtgccaacccgcaaacagcaccgccccccgggggcggtcatttctgttgaaacagcggcaaacaaagcagctctgcggcgctggggcgaagcgcgccgtcgaaggtgagggctttgcaaaccagatattcgacgtctatgtccatcttgtagtagcgggtccaggccggtcgggtgtaaggcgggcgattgttcccggccgcgcgggagcggtagcgcgaggtgaggcgcgattctggatgcggggaaaactcgtcaacgtggacctgggcctgtcggatgatgcgggtgatctgactgtcgcacgggccccttttggggccgcggggggccgagaacaaggacgcgttgtggacggcagtctcgaagatcaccagaccggcgctccaaatgtcgacggtcgtggtatacggatccccggccaggacctcgggggcgttggtgtcgatggttccggcgattccgtaggggaaggggcttgatcgggaaccctgcacgaagcacgcggcaccaaagtcccccaggcaaatgtcctcgggggtgttaataaaaatattttcggtcttaatgtcgcggtggataatgccctggcggtgaatgtagtcaacggcgcttaggagctgccgggagaccgctgcgatctgcgggcgtcccagtgggttcaggcgcctactcagataggtatacaggtcggcctggtacttggggaggaccagacacgtgaccccggagacgacatgcaggtccaggaggggcaggatcgccgggtggtccagtcgcctcagcagtcgcgcctcgtggctcgtgctcgtgtaccaccccgccttcacgattacccgttgggggtaatctgggtggctgctgtcaaagacacacccctccgatcctggggtgagcgctccgtggatcgtaaagcccatgccagtcaccagcttggccatggtcgaggggggcttgccgccgcggctgatggctcgagccgcctgcctgtccatggcgtccagctcttctgcggtaaatcccgtggccccaatctcatcccggctgcgtcgtcgtataccggggggagatgcgccacgcgggggagggatgtggtcgttggccccgataaggggaccggtcgcgtccccgggcagaaaaagctcctctgcgtattcctccggataggccacgtcgtccggggcgtcctcgtcgacatcgtccgcggcatccgcgctggggtcgtcctctatggggtagtcctggtttccgtacatctgggccaggatctcctgcagatgacacaggcgctcggcatcgccgggtggtgtggtgtgggaaggtttgggggtctccgggggcggggagtccaggcacgcgtcctcggctggggtataaaaggggccatgaggaaacacccgggacggctttgtctccggcgggacggcctcctccttcctcctgccctgtcccccgtaaacgcgacaaaacttacgacaggccattcgccgcaccgtgagtgccaaccaacgagcaccccgaacgacgggccccggggttttaaggagcggcagtttgacgacccaccccctgacctacccccccgtaaataaccctcccctcccccggacgcctccgctgccggtcgctccaagggcccccccgggaaggcgggtctgtggaccgtagggcccttaaatttttagagcagcccccgcgtcggcctgtctccccgccgtgcgtggccttacaaatctgcaagtgccccaaaccggacacgggcctgtaatataccaacatgggcgttgttgtcgtcaacgtaatgaccctccttgaccagaacaacgccctgccccggacttccgtcgacgcaagcccggccctgtggagcttcctgcttaggcagtgccgcattttggcatcagaacccctgggtaccccggtcgtcgttcgcccggccaaccttcgacggttggccgagccgctgatggacttacccaaacccacccgcccgatcgtgcgcactaggtcctgtcgctgccccccaaacaccaccacgggcctgtttgcggaggacagccccttggagagcaccgaggtcgtggacgccgtggcgtgcttccgactgttgcaccgagaccaacccagcccccctcgcctctaccacttgtgggtggtaggcgcggcggatctgtgtgtgccgtttctcgaatacgcccaaaaaatccggctcggggtaagatttatcgccatcaagaccccagacgcgtgggtgggagaaccgtgggccgtgccgactcggtttttgcccgagtggaccgtggcgtggaccccgttccccgcggcacccaaccaccccctggagaccctgctcagccggtacgaataccagtacggcgtggtcctgcccgggaccaacggacgggagcgcgattgtatgcgctggctgcggtccctgattgctctgcacaaaccccacccagctacctcccacccccttacgacgtcccattcggtgcggcgtccgtgttgtgcgtgtatgggtatgcccgagattttagacgagcaacccacatcaccgggccgtggtccgcaagaaacggaccctctgatcgccgttcgcggcgaacggcccagacttcctcacatctgctatccggttaccaccctgtagccccgatgtcaataaacccccaaacaccccccatgtacgcgtggtctgtttctctccgcccttcccgccattaagacgctgggacaaacgctttgattttggtcttttattttggggacatacaagggggtcggggcgaccggactcacggccggagaaacgtgtcgctgcacggataggggcaggcggtggagaagcgcattttccggcagccgtccagacacttgcggtcttctgctgcgcgacccgccccagaatcggatgggcccgggcgttccacggagctggtatcggccacgaccgcagacagccagggctgggagccctcctggggggtccagtcaaactccccaaactcatcctccagacgcacagcgagggacccgcggggttctggggtttccagcgtaacgggggagggggcatcctccgtgtcggactgggacgcgagcgtgtggtccgaaccggcggcctccagatcggtggcatcggagatttcatcatcgcttgtcgcgctgagatgaatctcgagattactaagatcacactccgggccgtaccgtctggcctccaaacaaggaagcttgcacacgggttctgcggtggcgtcgaatcgagcctccacctcccgtatggtgttgcgcaggtgcatgccccaggttccgccggacacctgcagcaagcggcaccacgtgcgcggggccagacgggctcggcagtatcccatcaggtaacagtcgcgtatcaggtggcgcaggcggttggcactgccgtgggggtcccgggcgacccgcaggacccgaaacagctgattgatacactggcgcatgtagcccaggtcgggggtccatcgtgcgctgctccgcctctgggcctggcgcaccgagcgccggagcattgcatttgggcttggggccgacggggtgggggcccggggctgcgtttcccgggtagaccggacccgccccatcttaggaaaaataaccccatcccgccgatcgggagagctagtgagccgcaggtttacccgggcccgcttgggtcgtgggggaatgtcgtcacaagaccagtcggacgtgtcgtcggggtcgtccgacaccgacgcatccgtttccgtccccgtggtggattccgccgacatgtccagaaaaaaccgccccccaagcctccggggggccctacggccaccgatgcggggggcttcctcctggtccccagactcggtcgaatccgatgctgtctcggattcgacctcagactccaaggctgtctcggattcgacctcagactccgatgagagggggcgggcagggcgcttgcgcttgcgcgtgcccaggggcggggatcggagagcgggacgccgcgcttttacacaaggcacaaaagcgcctggggaaatgtcggccatccagaaaacgtcccggaggaccacagtggctcccccccccccccccgacgagcaggaagcggtccacgcaacggtcgccgccggtcgcctcgacgagggcgttcctcctgcgggaaggcacgaacgcgggtgagccccctcctccgcccccgcgtcccccctcctccgcccccgcgtcccccctcctccgcccccgcgtcccccctcctccgcccccgcgtcccccctcctccgcccccgcgtccccccctcctccgcccacccaaggtgcttacccgtgcaaaaaaggcggaccggtgggtttctgtcgtcggaggcccccggggtgcgtcccctgtgtttcgtgggtggggtgggcgggtctttcccccccgcgtccgcgtgtccctttccgatgcgatcccgatcccgagccggggcgtcgcgatgccgacgccgtccgctccgacggccctctgcgactcccgctcccggtccgcgtgctccgcagccgctcccgtcgttcgtggccggcgccgtctgcgggcgtcggtcgcgccgggcctttatgtgcgccggagagacccgccccccgccgcccgggcccgcccccggggccggcgcggagtcgggcacggcgccagtgctcgcacttcgccctaataatatatatatattgggacgaagtgcgaacgcttcgcgttctcacttcttttacccggcggccccgcccccttggggcggtcccgcccgccggccaatgggggggcggcaaggcgggcggtggcggccgctctagaagatctggcctccgcgccgggttttggcgcctcccgcgggcgcccccctcctcacggcgagcgctgccacgtcagacgaagggcgcaggagcgtcctgatccttccgcccggacgctcaggacagcggcccgctgctcataagactcggccttagaaccccagtatcagcagaaggacattttaggacgggacttgggtgactctagggcactggttttctttccagagagcggaacaggcgaggaaaagtagtcccttctcggcgattctgcggagggatctccgtggggcggtgaacgccgatgattatataaggacgcgccgggtgtggcacagctagttccgtcgcagccgggatttgggtcgcggttcttgtttgtggatcgctgtgatcgtcacttggtgagtagcgggctgctgggctggccggggctttcgtggccgccgggccgctcggtgggacggaagcgtgtggagagaccgccaagggctgtagtctgggtccgcgagcaaggttgccctgaactgggggttggggggagcgcagcaaaatggcggctgttcccgagtcttgaatggaagacgcttgtgaggcgggctgtgaggtcgttgaaacaaggtggggggcatggtgggcggcaagaacccaaggtcttgaggccttcgctaatgcgggaaagctcttattcgggtgagatgggctggggcaccatctggggaccctgacgtgaagtttgtcactgactggagaactcggtttgtcgtctgttgcgggggcggcagttatggcggtgccgttgggcagtgcacccgtacctttgggagcgcgcgccctcgtcgtgtcgtgacgtcacccgttctgttggcttataatgcagggtggggccacctgccggtaggtgtgcggtaggcttttctccgtcgcaggacgcagggttcgggcctagggtaggctctcctgaatcgacaggcgccggacctctggtgaggggagggataagtgaggcgtcagtttctttggtcggttttatgtacctatcttcttaagtagctgaagctccggttttgaactatgcgctcggggttggcgagtgtgttttgtgaagttttttaggcaccttttgaaatgtaatcatttgggtcaatatgtaattttcagtgttagactagtaaattgtccgctaaattctggccgtttttggcttttttgttagacgaagcttgatccaccggatccccgcggatggtgagcaagggcgaggaggataacatggccatcatcgatccccgcggatggtgagcaagggcgaggaggataacatggccatcatcaaggagttcatgcgcttcaaggtgcacatggagggctccgtgaacggccacgagttcgagatcgagggcgagggcgagggccgcccctacgagggcacccagaccgccaagctgaaggtgaccaagggtggccccctgcccttcgcctgggacatcctgtcccctcagttcatgtacggctccaaggcctacgtgaagcaccccgccgacatccccgactacttgaagctgtccttccccgagggcttcaagtgggagcgcgtgatgaacttcgaggacggcggcgtggtgaccgtgacccaggactcctccctgcaggacggcgagttcatctacaaggtgaagctgcgcggcaccaacttcccctccgacggccccgtaatgcagaagaagaccatgggctgggaggcctcctccgagcggatgtaccccgaggacggcgccctgaagggcgagatcaagcagaggctgaagctgaaggacggcggccactacgacgctgaggtcaagaccacctacaaggccaagaagcccgtgcagctgcccggcgcctacaacgtcaacatcaagttggacatcacctcccacaacgaggactacaccatcgtggaacagtacgaacgcgccgagggccgccactccaccggcggcatggacgagctgtacaaggacccatgatagagatctatcgatcctgaattcgatacagacatgataagatacattgatgagtttggacaaaccacaactagaatgcagtgaaaaaaatgctttatttgtgaaatttgtgatgctattgctttatttgtaaccattataagctgcaataaacaagttaacaacaacaattgcattcattttatgtttcaggttcagggggaggtgtgggaggttttttatcgataccgtcgacctcgagggggggcccggtacccagcgtgcgccgtgctctgttggtttcacctgtggcagcccgggccccccgcgggcgcgcgcgcgcgcaaaaaaggcgggcggcggtccgggcggcgtgcgcgcgcgcggcgggcgtggggggcggggccgcgggagcggggggaggagcggggggaggagcggggggaggagcggggggaggagcggggggaggagcggggggaggagcggggggaggagcggggggaggagcggggggaggagcggggggaggagcggggggaggagcggggggaggagcggggggaggagcggggggaggagcggggggaggagcggggggaggagcggggggaggagcggggggaggagcggccagacgccgaaaacgggccccccccaaaacacaccccccgggggtcgcgcgcggccctttaaagcggtggcggcggagcccgggccccccgcgggcgcgcgcgcgcgcaaaaaaggcgggcggcggtccgggcggcgtgcgcgcgcgcggcgggcgtggggggcggggccgcgggagcggggggaggagcggggggaggagcggggggaggagcggggggaggagcggggggaggagcggggggaggagcggggggaggagcggggggaggagcggggggaggagcggggggaggagcggggggaggagcggggggaggagcggggggaggagcggggggaggagcggggggaggagcggggggaggagcggggggaggagcggggggaggagcggccagacgccgaaaacgggccccccccaaaacacaccccccgggggtcgcgcgcggccctttaaagcggtggcggcgggcagcccgggccccccgcggccgagactagcgagttagacaggcaagcactactcgcctctgcacgcacatgcttgcctgtcaaactctaccaccccggcacgctctctgtctccatggcccgccgccgccatcgcggcccccgccgcccccggccgcccgggcccacgggcgcggtcccaaccgcacagtcccaggtaacctccacgcccaactcggaacccgtggtcaggagcgcgcccgcggccgccccgccgccgccccccgccagtgggcccccgccttcttgttcgctgctgctgcgccagtggctccacgttcccgagtccgcgtccgacgacgacgacgacgactggccggacagccccccgcccgagccggcgccagaggcccggcccaccgccgccgccccccgcccccggtccccaccgcccggcgcgggcccggggggcggggctaacccctcccaccccccctcacgccccttccgccttccgccgcgcctcgccctccgcctgcgcgtcaccgcagagcacctggcgcgcctgcgcctgcgacgcgcgggcggggagggggcgccgaagccccccgcgacccccgcgacccccgcgacccccacgcgggtgcgcttctcgccccacgtccgggtgcgccacctggtggtctgggcctcggccgcccgcctggcgcgccgcggctcgtgggcccgcgagcgggccgaccgggctcggttccggcgccgggtggcggaggccgaggcggtcatcgggccgtgcctggggcccgaggcccgtgcccgggccctggcccgcggagccggcccggcgaactcggtctaacgttacacccgaggcggcctgggtcttccgcggagctcccgggagctccgcaccaagccgctctccggagagacgatggcaggagccgcgcatatatacgcttggagccggcccgcccccgaggcgggcccgccctcggagggcgggactggccaatcggcggccgccagcgcggcggggcccggccaaccagcgtccgccgagtcttcggggcccggcccactgggcggtaactcccgcccagtgggccgggccgcccacttcccggtatggtaattaaaaacttgcagaggcagatccccctgcttcatccccgtggcccgttgctcgcgtttgctggcggtgtccccggaagaaatatatttgcatgtctttagttctatgatgacacaaaccccgcccagcgtcttgtcattggcgaattcgaacacgcagatgcagtcggggcggcgcggtcccaggtccacttcgcatattaaggtgacgcgtgtggcctcgaacaccgagcgaccctgcagcgacccgcttaacagcgtcaacagcgtgccgcagatctcgagctcaagcttcgaattctgcagtcgacggtaccgcgggccccgatatccaattgcgggcgctgggtggtctctggccgcgcccactacaccagccaatccgtgtcggggaggtggaaagtgaaagacacgggcaccacacaccagcgggtcttttgtgttggccctaataaaaaaaactcaggggatttttgctgtctgttgggaaataaaggtttacttttgtatcttttccctgtctgtgttggatgtatcgcgggggtgcgtgggagtgggggtgcgtgggagtgggggtgcgtgggagtgggggtgcgtgggagtgggggtgcgtgggagtgggggtgcgtgggagtgggggtgcgtgggagtgggggtgcgtgggagtgggggtgcgtgggagtgggggtgcgtgggagtggggggtgcgtgggagtgggggtgcgtgggagtgggggtgcgtgggagtgggggtgcgtgggagtgggggtgcgtgggagtgggggtgccatgttgggcaggctctggtgttaaccacagagccgcggcccgggctgcctgaccaccgatccccgaaagcatcctgccactggcatggagccagaaccacagtgggttgggtgtgggtgttaagtttccgcgagcgcctgcccgcccggactgacctggcctctggccgccacaaagggcgggggggggggttaactacactatagggcaacaaaggatgggaggggtagcggggcgggacggggcgcccaaaagggggtcggccacaccacagacgtgggtgttggggggtggggcggaggggtggggggggagacagaaacaggaacatagttagaaaacaagaatgcggtgcagccagagaatcacaggagacgaggggatgggcgtgttggttaccaacccacacccaggcatgctcggtggtatgaaggagggggggcggtgtttcttagagaccgccgggggacgtggggttggtgtgcaaaggcacgcgcacccgcgccggccaggtgggccggtaccccatccccccctcccccgacccttcccacccccgcgtgccagagatcaccccggtcccccggcacccgccactcctccatatcctcgctttaggaacaactttaggggggggtacacacgcgccgtgcatttccttccacaccccccctcccccgcactccccccccccaggcagtaagacccaaacatagagagccaggcacaaaaacacaggcggggtgggacacatgccttcttggagtacgtgggtcattggcgtggggggttacagcgacaccggccgaccccctggcggtcttccagccggcccttagataagggggcagttggtggtcggacgggtaagtaacagagtctaactaagggtgggagggggggaaaataacgggctggtgtgctgtaacacgagcccacccgcgagtggcgtggccgaccttagcctctggggcgccccctgtcgtttgggtccccccccctctattggggagaagcaggtgtctaacctacctggaaacgcggcgtctttgttgaacgacaccggggcgccctcgacgagtgggataacgggggaggaagggagggaggagggtactgggggtgaagggggggggaagaagcgagaacaggaaaggcgacggagcccggcagaacaccgagaaaaacgcagcgcatgcgccgggccgttgtggggccccgggccggggccccttgggtccgccggggccccgggccgggccgccacgggggccggccgttggcggtaaccccgagtgttcatctcaggccccgggccgggaacccggaaaagcctccggggggcctttttcgcgtcgcgtgccggcgagcgggtccggacggggcccggaccgccgcggtcgggggcccctcgtcccgggccgtacgcggccttcgccccgtgaggggacagacgaacgaaacattccggcgacggaacgaaaaacaccccagacgggttaaagaaacagaaaccgcaacccccaccacccccgaaacggggaaaacgaaaaaacagaccagcggccggccggcgcttagggggaggatgtcgccgacgccccttggccgccccggctgcaggggggcccggagagccgcggcacccggacgcgcccggaaagtctttcgcaccaccggcgatcggcacggccgcgcccccgcttttataaaggctcagatgacgcagcaaaaacaggccacagcaccacatgggtaggtgatgtaattttattttcctcgtctgcggcctaatggatttccgggcgcggtgcccctgtctgcagagcacttaacggattgatatctcgcgggcacgcgcgcccttaatggaccggcgcggggcggggggccggatacccacacgggcggggggggggtgtcgcgggccgtctgctggcccgcggccacataaacaatgactcggggcctttctgcctctgccgcttgtgtgtgcgcgcgccggctctgcggtgtcggcggcggcggcggcggtggccgccgtgttcggtctcggtagccggccggcgggtggactcgcggggggccggagggtggaaggcaggggggtgtaggatgggtatcaggacttccacttcccgtccttccatcccccgttcccctcggttgttcctcgcctcccccaacaccccgccgctttccgttggggttgttattgttgtcgggatcgtgcgggccgggggtcgccggggcaggggcgggggcgtgggcgggggtgctcgtcgatcgaccgggctcagtgggggcgtggggtgggtgggagaaggcgaggagactggggtgggggtgtcggtgggtggttgttttttttttttgtggttgttttttgtgtctgtttccgtcccccgtcacccccctccctccgtcccctccgtccccccgtcgcgggtgtttgtgtttgtttattccgacatcggtttatttaaaataaacacagccgttctgcgtgtctgttcttgcgtgtggctgggggcttatatgtggggtcccgggggcgggatggggtttagcggcggggggcggcgcgccggacggggcgctggagataacggcccccggggaacgggggaccggggctgggtatcccgaggtgggtgggtgggcggcggtggccgggccgggccgggccgggccgggtgggcggggtttggaaaaacgaggaggaggaggagaaggcggggggggagacggggggaaagcaaggacacggcccggggggtgggagcgcgggccgggccgctcgtaagagccgcgacccggccgccggggagcgttgtcgccgtcggtctgccggcccccgtccctcccttttttgaccaaccagcgccctcccccccaccaccattcctactaccaccaccaccaccacccccaccaccgacacctcccgcgcacccccgcccacatccccccaccccgcaccacgagcacggggtgggggtagcaggggatcaaaggggggcaaagccggcggggcggttcgggggggcgggagaccgagtaggcccgcccatacgcggcccctcccggcagccacgccccccagcgttgggtgtcacggggaaagagcaggggagagggggggagagggggagagggggggagagggggagaggggggagagggggagaggggggggggagaggggagagggggggagaggggagagggggggagaggggagagggggggagaggggagagggggggagaggggagagggggggagaggggagagggggggagaggggagagggggggagagggggtatataaaccaacgaaaagcgcgggaacggggatacggggcttgtgtggcacgacgtcgtggttgtgttactgggcaaacacttggggactgtaggtttctgtgggtgccgaccctaggcgctatggggattttgggttgggtcgggcttattgccgttggggttttgtgtgtgcgggggggcttgtcttcaaccgaatatgttattcggagtcgggtggctcgagaggtgggggatatattaaaggtgccttgtgtgccgctcccgtctgacgatcttgattggcgttacgagaccccctcggctataaactatgctttgatagacggtatatttttgcgttatcactgtcccggattggacacggtcttgtgggataggcatgcccagaaggcatattgggttaacccctttttatttgtggcgggttttctggaggacttgagtcaccccgcgtttcctgccaacacccaggaaacagaaacgcgcttggccctttataaagagatacgccaggcgctggacagtcgcaagcaggccgccagccacacacctgtgaaggctgggtgtgtgaactttgactattcgcgcacccgccgctgtgtagggcgacaggatttgggacctaccaacggaacgtctggacggaccccggttctgccgccggacgatgaagcgggcctgcaaccgaagcccctcaccacgccgccgcccatcatcgccacgtcggaccccaccccgcgacgggacgccgccacaaaaagcagacgccgacgaccccactcccggcgcctctaacgatgcctcgacggaaacccgtccgggttcggggggcgaaccggccgcctgtcgctcgtcagggccggcgggcgctcctcgccgccctagaggctgtcccgctggtgtgacgttttcctcgtccgcgccccccgaccctcccatggatttaacaaacgggggggtgtcgcctgcggcgacctcggcgcctctggactggaccacgtttcggcgtgtgtttctgatcgacgacgcgtggcggcccctgatggagcctgagctggcgaaccccttaaccgcccacctcctggccgaatataatcgtcggtgccagaccgaagaggtgctgccgccgcgggaggatgtgttttcgtggactcgttattgcacccccgacgaggtgcgcgtggttatcatcggccaggacccatatcaccaccccggccaggcgcacggacttgcgtttagcgtgcgcgcgaacgtgccgcctcccccgagtcttcggaatgtcttggtggccgtcaagaactgttatcccgaggcacggatgagcggccacggttgcctggaaaagtgggcgcgggacggcgtcctgttactaaacacgaccctgaccgtcaagcgcggggcggcggcgtcccactctagaatcggttgggaccgcttcgtgggcggagttatccgccggttggccgcgcgccgccccggcctggtgtttatgctctggggcgcacacgcccagaatgccatcaggccggaccctcgggtccattgcgtcctcaagttttcgcacccgtcgcccctctccaaggttccgttcggaacctgccagcatttcctcgtggcgaaccgatacctcgagacccggtcgatttcacccatcgactggtcggtttgaaaggcatcgacgtccggggtttttgtcggtgggggcttttgggtatttccgatgaataaagacggttaatggttaaacctctggtctcatacgggtcggtgatgtcgggcgtcgggggagagggagttccctctgcgcttgcgattctagcctcgtggggctggacgttcgacacgccaaaccacgagtcggggatatcgccagatacgactcccgcagattccattcggggggccgctgtggcctcacctaaccaacctttacacgggggcccggaacgggaggccacagcgccgtctttctccccaacgcgcgcggatgacggcccgccctgtaccgacgggccctacgtgacgtttgataccctgtttatggtgtcgtcgatcgacgaattagggcgtcgccagctcacggacaccatccgcaaggacctgcggttgtcgctggccaagtttagcattgcgtgcaccaagacctcctcgttttcgggaaacgccccgcgccaccacagacgcggggcgttccagcgcggcacgcgggcgccgcgcagcaacaaaagcctccagatgtttgtgttgtgcaaacgcgcccacgccgctcgagtgcgagagcagcttcgggtcgttattcagtcccgcaagccgcgcaagtattacacgcgatcttcggacgggcggctctgccccgccgtccccgtgttcgtccacgagttcgtctcgtccgagccaatgcgcctccaccgagataacgtcatgctggcctcgggggccgagtaaccgccccccccccatgccaccctcactgcccgtcgcgcgtgtttgatgttaataaataacacataaatttggctggttgtttgttgtctttaatggaccgcccgcaagggggggggggcatttcagtgtcgggtgacgagcgcgatccggccgggatcctaggaccccaaaagtttgtctgcgtattccagggtggggctcagttgaatctcccgcagcacctctaccagcaggtccgcggtgggctggagaaactcggccgtcccggggcaggcggttgtcgggggtggaggcgcggcgcccaccccgtgtgccgcgcctggcgtctcctctgggggcgacccgtaaatggttgcagtgatgtaaatggtgtccgcggtccagaccacggtcaaaatgccggccgtggcgctccgggcgctttcgccgcgcgaggagctgacccaggagtcgaacggatacgcgtacatatgggcgtcccacccgcgttcgagcttctggttgctgtcccggcctataaagcggtaggcacaaaattcggcgcgacagtcgataatcaccaacagcccaatgggggtgtgctggataacaacgcctccgcgcggcaggcggtcctggcgctcccggccccgtaccatgatcgcgcgggtgccgtactcaaaaacatgcaccacctgcgcggcgtcgggcagtgcgctggtcagcgaggccctggcgtggcataggctatacgcgatggtcgtctgtggattggacatctcgcggtgggtagtgagtcccccgggccgggttcggtggaactgtaaggggacggcgggttaatagacaatgaccacgttcggatcgcgcagagccgatagtatgtgctcactaatgacgtcatcgcgctcgtggcgctcccggagcggatttaagttcatgcgaaggaattcggaggaggtggtgcgggacatggccacgtacgcgctgttgaggcgcaggttgccgggcgtaaagcagatggcgaccttgtccaggctaaggccctgggagcgcgtgatggtcatggcaagcttggagctgatgccgtagtcggcgtttatggccatggccagctccgtagagtcaatggactcgacaaactcgctgatgttggtgttgacgacggacatgaagccgtgttggtcccgcaagaccacgtaaggcaggggggcctcttccagtaactcggccacgttggccgtcgcgtgccgcctccgcagctcgtccgcaaaggcaaacacccgtgtgtacgtgtatcccatgagcgtataattgtccgtctgcagggcgacggacatcagccccccgcgcggcgagccggtcagcatctcgcagccccggaagataacgttgtccacgtacgtgctaaagggggcgacttcaaatgcctccccgaagagctcttggaggattcggaatctcccgaggaaggcccgcttcagcagcgcaaactgggtgtgaacggcggcggtggtctccggttccccgggggtgtagtggcagtaaaacacgtcgagctgttgttcgtccagccccgcgaaaataacgtcgaggtcgtcgtcgggaaaatcgtccgggcccccgtcccgcggccccagttgcttaaaatcaaacgcacgctcgccgggggcgcctgcgtcggccattaccgacgcctgcgtcggcacccccgaagatttggggcgcagagacagaatctccgccgttagttctcccatgcgggcgtacgcgagggtcctctgggtcgcatccaggcccgggcgctgcagaaagttgtaaaaggagataagcccgctaaatatgagccgcgacaggaacctgtaggcaaactccaccgaagtctccccctgagtctttacaaagctgtcgtcacgcaacactgcctcgaaggcccggaacgtcccactaaacccaaaaaccagttttcgcaggcgcgcggtcaccgcgatctggctgttgaggacgtaagtgacgtcgttgcgggccacgaccagctgctgtttgctgtgcacctcgcagcgcatgtgccccgcgtcctggtcctggctctgcgagtagttggtgatgcggctggcgttggccgtgagccacttttcaatagtcaggccgggctggtgtgtcagccgtcggtattcgtcaaactccttgaccgacacgaacgtaagcacggggagggtgaacacgacgaactccccctcacgggtcaccttcaggtaggcgtggagcttggccatgtacgcgctcacctctttgtgggaggagaacagccgcgtccagccggggaggttggcggggttggtgatgtagttttccgggacgacgaagcgatccacgaactgcatgtgctcctcggtgatgggcaggccgtactccagcaccttcatgaggttaccgaactcgtgctcgacgcaccgtttgttgttaataaaaatggcccagctatacgagaggcgggcgtactcgcgcagcgtgcggttgcagatgaggtacgtgagcacgttctcgctctggcggacggaacaccgcagtttctggtgctcgaaggtcgactccagggacgccgtctgcgtcggcgagcccacacacaccaacacgggccgcaggcgggccgcgtactggggggtgtggtacagggcgttaatcatccaccagcaatacaccacggccgtgaggaggtgacgcccaaggagcccggcctcgtcgatgacgatcacgttgctgcgggtaaaggccggcagcgccccgtgggtggccggggccaaccgcgtcagggcgccctcggccaaccccagggtccgttccagggcggccagggcgcgaaactcgttccgcaactcctcgcccccggaggcggccagggcgcgcttcgtgaggtccaaaatcacctcccagtagtacgtcagatctcgtcgctgcaggtcctccagcgaggcggggttgctggtcagggtgtacgggtactgtcccagttgggcctggacgtgattcccgcgaaacccaaattcatgaaagatggtgttgatgggtcggctgagaaaggcgcccgagagtttggcgtacatgttttgggccgcaatgcgcgtggcgcccgtcaccacacagtccaagacctcgttgattgtctgcacgcacgtgctctttccggagccagcgttgccggtgataagatacaccgcgaacggaaactccctgaggggcaggcctgcgggggactctaaggccgccacgtcccggaaccactgcagacggggcacttgcgctccgtcgagctgttgttgcgagagctctcggatgcgcttaaggattggctgcaccccgtgcatagacgtaaaatttaaaaaggcctcggccctccctggaacggctggtcggtccccgggttgctgaaggtgcggcgggccgggtttctgtccgtctagctggcgctccccgccggccgccgccatgaccgcaccacgctcgtgggcccccactacgcgtgcgcggggggacacggaagcgctgtgctcccccgaggacggctgggtaaaggttcaccccacccccggtacgatgctgttccgtgagattctccacgggcagctggggtataccgagggccagggggtgtacaacgtcgtccggtccagcgaggcgaccacccggcagctgcaggcggcgatctttcacgcgctcctcaacgccaccacttaccgggacctcgaggcggactggctcggccacgtggcggcccgcggtctgcagccccaacggctggttcgccggtacaggaacgcccgggaggcggatatcgccggggtggccgagcgggtgttcgacacgtggcggaacacgcttaggacgacgctgctggactttgcccacgggttggtcgcctgctttgcgccgggcggcccgagcggcccgtcaagcttccccaaatatatcgactggctgacgtgcctggggctggtccccatattacgcaagcgacaagaagggggtgtgacgcagggtctgagggcgtttctcaagcagcacccgctgacccgccagctggccacggtcgcggaggccgcggagcgcgccggccccgggttttttgagctggcgctggccttcgactccacgcgcgtggcggactacgaccgcgtgtatatctactacaaccaccgccggggcgactggctcgtgcgagaccccatcagcgggcagcgcggagaatgtctggtgctgtggccccccttgtggaccggggaccgtctggtcttcgattcgcccgtccagcggctgtttcccgagatcgtcgcgtgtcactccctccgggaacacgcgcacgtctgccggctgcgcaataccgcgtccgtcaaggtgctgctggggcgcaagagcgacagcgagcgcggggtggccggtgccgcgcgggtcgttaacaaggtgttgggggaggacgacgagaccaaggccgggtcggccgcctcgcgcctcgtgcggcttatcatcaacatgaagggcatgcgccacgtaggcgacattaacgacaccgtgcgtgcctacctcgacgaggccggggggcacctgatagacgccccggccgtcgacggtaccctccctggattcggcaagggcggaaacagccgcgggtctgcgggccaggaccagggggggcgggcgccgcagcttcgccaggccttccgcacggccgtggttaacaacatcaacggcgtgttggagggctatataaataacctgtttggaaccatcgagcgcctgcgcgagaccaacgcgggcctggcgacccaattgcaggagcgcgaccgcgagctccggcgcgcaacagcgggggccctggagcgccagcagcgcgcggccgacctggcggccgagtccgtgaccggtggatgcggcagccgccctgcgggggcggacctgctccgggccgactatgacattatcgacgtcagcaagtccatggacgacgacacgtacgtcgccaacagctttcagcacccgtacatcccttcgtacgcccaggacctggagcgcctgtcgcgcctctgggagcacgagctggtgcgctgttttaaaattctgtgtcaccgcaacaaccagggccaagagacgtcgatctcgtactccagcggggcgatcgccgcattcgtcgccccctactttgagtcagtgcttcgggccccccgggtaggcgcgcccatcacgggctccgatgtcatcctgggggaggaggagttatgggatgcggtgtttaagaaaacccgcctgcaaacgtacctgacagacatcgcggccctgttcgtcgcggacgtccagcacgcagcgctgcccccgcccccctccccggtcggcgccgatttccggcccggcgcgtccccgcggggccggtccagatcgcggtcgcccggaagaactgcgccaggcgcgccggaccagggcgggggcatcgggcaccgggatggccgccgcgacggccgacgatgaggggtcggccgccaccatcctcaagcaggccatcgccggggaccgcagcctggtcgaggcggccgaggcgattagccagcagacgctgctccgcctggcctgcgaggtgcgccaggtcggcgaccgccagccgcggtttaccgccaccagcatcgcgcgcgtcgacgtcgcgcctgggtgccggttgcggttcgttctggacgggagtcccgaggacgcctatgtgacgtcggaggattactttaagcgctgctgcggccagtccagttatcgcggcttcgcggtggcggtcctgacggccaacgaggaccacgtgcacagcctggccgtgccccccctcgttctgctgcaccggttctccctgttcaaccccagggacctcctggactttgagcttgcctgtctgctgatgtacctggagaactgcccccgaagccacgccaccccgtcgacctttgccaaggttctggcgtggctcggggtcgcgggtcgccgcacgtccccattcgaacgcgttcgctgccttttcctccgcagttgccactgggtcctaaacacactcatgttcatggtgcacgtaaaaccgttcgacgacgagttcgtcctgccccactggtacatggcccggtacctgctggccaacaacccgccccccgttctctcggccctgttctgtgccaccccgacgagctcctcattccggctgccggggccgcccccccgctccgactgcgtggcctataaccccgccgggatcatggggagctgctgggcgtcggaggaggtgcgcgcgcctctggtctattggtggctttcggagaccccaaaacgacagacgtcgtcgctgttttatcagttttgttgaattttaggaaataaacccggttttgtttctgtggcctcccgacggatgcgcgtgtccttcctccgtcttggtgggtgggtgtctgtgtatcgcgtcccatctgtgcggagagggggggcatgtcggcacgtattcggacagactcaagcacacacgggggagcgctcttgtctcagggcaatgtttttattggtcaaactcaggcaaacagaaacgacatcttgtcgtcaaagggatacacaaacttccccccctctccccatactcccgccagcaccccggtaaacaccaactcaatctcgcgcaggatttcgcgcaggtgatgagcgcagtccacgggggggagcacaaggggccgcgggtatagatcgacggggacgccgaccgactccccgcctccgggacagacacgcacgacgcgccgccagtagtgctctgcgtccagcaaggcgccgccgcggaaggcagtggggggcaaggggtcgctagcctcaaagggggacacccgaacgctccagtactccgcgtccaaccgtttattaaacgcgtccacgataaggcggtcgcaggcgtcctccataaggccccgggccgtgagtgcgtcctcctccggcacgcctgccgttgtcaggcccaggacccgtcgcagcgtgtcgcgtacgaccccggccgccgtggtgtacgcgggcccgcggagaggaaatcccccaagatggtcagtgttgtcgcgggagttccagaaccacactcccgcctggttccaggcgactgcgtgggtgtagacgccctcgagggccaggcacagtgggtgccgcagccggaggccgttggccctaagcacggctcccacggccgtctcgatggcccgccgggcgtcctcgatcaccccggaagccgcatccgcgtcttgggggtccacgttaaagacaccccagaacgcacccccatcgcccccgcagaccgcgaacttcaccgagctggccgtctcctcgatctgcaggcagacggcggccattaccccacccaggagctgccgcagcgcagggcaggcgtcgcacgtgtccgggaccaggcgctccaagacggccccggcccagggctctgagggagcggccaccaccagcgcgtccagtcttgctaggcccgtccggccgtgggggtccgccagcccgctccccccgaggtcggccagggccgccaggagctgggcgcgaagtccggggaagcaaaaccgcgccgtccagacgggcccgacggccgcgggcgggtctaacagttggatgattttagtggcgggatgccaccgcgccaccgcctcccgcaccgcgggcaggaggcatccggctgccgccgaggccacgccgggccaggctcgcggggggaggacgaccctggcccccaccgcgggccaggcccccaggagcgcggcgtaagcggccgcggccccgcgcaccaggtcccgtgccgactcggccgtggccggcacggtgaacgtgggccaacccggaaaccccaggacggcaaagtacgggacgggtcccccccggacctcaaactcgggccccagaaaggcaaagacgggggccagggccccgggggcggcgtggaccgtggtatgccactgccggaaaagggcgacgagcgccggcgcggagaacttctcgccggcgcttacaaagtagtcgtaatcgcggggcagcagcacccgtgccgtgactcgttgcgggtgcccgcgtggccgcaggcccacctcgcacacctcgaccaggtccccgaacgcgccctccttcttgatcggcggaaacgcaagagtctggtattcgcgcgcaaatagcgcggttccggtggtgatgttaacggtcagcgaagcggcggacgcgcactggggggtgtcgcgaatggccgccaggcgcgcccacgccagccgcgcgtcgggatgctcggcaacgcgcgccgccagggccatagggtcgatgtcaatgttggcctccgcgaccaggagagcggcgcgaggggcggcgggcgggccccacgacgctctctcaactttcaccaccagtcccgtgcgtgggtccgagccgatacgcagcggggcgaacagggccaccggcccggtctggcgctccagggccgccaggacgcacgcgtacagcgcccgccacagagtcgggttctccaggggctccagcggggaggcggccggcgtcgtcgcggcgcgggcggccgccacgacggcctggacggagacgtccgcggagccgtagaaatcccgcagctccgtcgcggtgacggagacctccgcaaagcgcgcgcgaccctcccctgcggcgttgcgacatacaaaatacaccagggcgtggaagtactcgcgagcgcgggggggcagccataccgcgtaaagggtaatggcgctgacgctctcctccacccacacgatatctgcggtgtccatcgcacggcccctaaggatcacgggcggtctgtgggtcccatgctgccgtgcctggccgggcccggtgggtcgcggaaaccggtgacggggggggggcggtttttggggttggggtgggggtgggaaacggcccgggtccgggggccaacttggcccctcggtgcgttccggcaacagcgccgccggtccgcggacgaccacgtaccgaacgagtgcggtcccgagacttatagggtgctaaagttcaccgccccctgcatcatgggccaggcctcggtggggagctccgacagcgccgcctccaggatgatgtcagcgttggggttggcgctggatgagtgcgtgcgcaaacagcgcccccacgcaggcacgcgtagcttgaagcgcgcgcccgcaaactcccgcttgtgggccataagcagggcgtacagctgcctgtgggtccggcaggcgctgtggtcgatgtggtgggcgtccaacaaccccacgattgtctgtttggtgaggtttttaacgcgccccgccccgggaaacgtctgcgtgcttttggccatctgcacgccaaacagttcgccccagattatcttgaacagcgccaccgcgtggtccgtctcgctaacggacccgcgcgggggacagccgcttagggcgtcggcgacgcgcttgacggcttcctccgagagcagaagtccgtcggttacgttacagtggcccagttcgaacaccagctgcatgtagcggtcgtagtggggggtcagtaggtccagcacgtcatcggggccgaaggtcctcccagatcccccggccgccgagtcccaatgcaggcgcgcggccatggtgctgcacaggcacaacagctcccagacgggggttacgttcagggtggggggcagggccacgagctccagctctccggtgacgttgatcgtggggatgacgcccgtggcgtagtggtcatagatccgccgaaatatggcgctgctgcgggtggccatgggaacgcggagacaggcctccagcaacgccaggtaaataaaccgcgtgcgtcccatcaggctgttgaggttgcgcatgagcgcgacaatttccgccggcgcgacatcggaccggaggtatttttcgacgaaaagacccacctcctccgtctcggcggcctgggccggcagcgacgcctcgggatcccggcaccgcagctcccgtagatcgcgctgggccctgagggcgtcgaaatgtacgccccgcaaaaacagacagaagtcctttggggtcagggtatcgtcgtgtccccagaagcgcacgcgtatgcagtttagggtcagcagcatgtgaaggatgttaaggctgtccgagagacacgccagcgtgcatctctcaaagtagtgtttgtaacggaatttgttgtagatgcgcgacccccgccccagcgacgtgtcgcatgccgacgcgtcacagcgccccttgaaccggcgacacagcaggtttgtgacctgggagaactgcgcgggccactggccgcaggaactgaccacgtgattaaggagcatgggcgtaaagacgggctccgagcgcgccccggagccgtccatgtaaatcagtagctcccccttgcggagggtgcgcacccgtcccagggactggtacacggacaccatgtccggtccgtagttcatgggttttacgtaggcgaacatgccatcaaagtgcaggggatcgaagctgaggcccacggttacgaccgtcgtgtatataaccacgcggtattggccccacgtggtcacgtccccgaggggggtgagcgagtgaagcaacagcacgcggtccgtaaactgacggcagaaccgggccacgatctccgcgaaggagaccgtcgacgaaaaaatgcagatgttatcgcccccgccaaggcgcgcttccagctccccaaagaacgtggccccccgggcgtccggagaggcgtccggagacgggccgctcggcggcccgggcgggcgcagggcagcctgcaggagctcggtccccagacgcgggagaaacaggcaccggcgcgccgaaaacccgggcatggcgtactcgccgaccaccacatgcacgtttttttcgccccggagaccgcacaggaagtccaccaactgcgcgttggcggttgcgtccatggcgatgatccgaggacaggtgcgcagcaggcgtagcattaacgcatccacgcggcccagttgctgcatcgttggcgaatagagctggcccagcgtcgacataacctcgtccagaacgaggacgtcgtagttgttcagaaggttggggcccacgcgatgaaggctttccacctggacgataagtcggtggaaggggcggtcgttcataatgtaattggtggatgagaagtaggtgacaaagtcgaccaggcctgactcagcgaaccgcgtcgccagggtctgggtaaaactccgacgacaggagacgacgagcacactcgtgtccggagagtggatcgcttcccgcagccagcggatcagcgcggtagtttttcccgaccccattggcgcgcggaccacagtcacgcacctggccgtcggggcgctcgcgttggggaaggtgacgggtccgtgctgctgccgctcgatcgttgttttcgggtgaacccggggcacccattcggccaaatcccccccgtacaacatccgcgctagcgatacgctcgacgtgtactgttcgcactcgtcgtccccaatgggacgcccggcccccagaggatctcccgactccgcgccccccacgaaaggcatgaccggggcgcggacggcgtggtgggtctggtgtgtgcaggtggcgacgtttgtggtctctgcggtctgcgtcacggggctcctcgtcctggcctctgtgttccgggcacggtttccctgcttttacgccacggcgagctcttatgccggggtgaactccacggccgaggtgcgcgggggtgtagccgtgcccctcaggttggacacgcagagccttgtgggcacttatgtaatcacggccgtgttgttgttggccgcggccgtgtatgccgtggtcggcgccgtgacctcccgctacgaccgcgccctggacgcgggccgccgtctggctgcggcccgcatggccatgccgcacgccacgctgatcgccggaaacgtctgctcttggttgctgcagatcaccgtcctgttgctggcccatcgcaccagccagctggcccacctggtttacgtcctgcactttgcgtgtctggtgtattttgcggcccatttttgcaccaggggggtcctgagcgggacgtatctgcgtcaggtgcacggcctgatggagccggccccgactcatcatcgcgtcgttggcccggctcgagccgtgctgacaaacgccttgctgttgggcgtcttcctgtgcacggccgacgccgcggtatccctgaataccatcgccgcgttcaactttaatttttcggccccgggcatgctcatatgcctgaccgtgctgttcgcccttctcgtcgtatcgctgttgttggtggtcgagggggtgttgtgtcactacgtgcgcgtgttggtgggcccccacctgggggccgtggccgccacgggcatcgtcggcctggcatgcgagcactattacaccaacggctactacgttgtggagacgcagtggccgggggcccagacgggagtccgcgtcgccctcgccctggtcgccgcctttgccctcggcatggccgtgctccgctgcacccgcgcctatctgtatcacaggcggcaccacaccaaattttttatgcgcatgcgcgacacgcgacaccgcgcacattccgccctcaagcgcgtacgcagttccatgcgcggatcgcgagacggccgccacaggcccgcacccggcagcccgcccgggattcccgaatatgcggaagacccctacgcgatctcatacggcggccagctcgaccggtacggagattccgacggggagccgatttacgacgaggtggcggacgaccaaaccgacgtattgtacgccaagatacaacacccgcggcacctgcccgacgacgagcccatctatgacaccgttggggggtacgaccccgagcccgccgaggaccccgtgtacagcaccgtccgccgttggtagctgtttggttccgttttaataaaccgtttgtgtttaacccgaccgtggtgtatgtctggtgtgtggcgtccgatcccgttactatcaccgttccccccaaaccccggcgattgtgggtttttttaaaaacgacacgcgtgcgaccgtatacagaacattgttgttttttattcgctatcggacatggggggtggaaactgggtggcggggcaggcgcctccgggggttcgccggtgagtgtggcgcgaggggggatccgacgaacgcaggcgctgtctccccggggcccgcgtaaccccgcgcatatccgggggcacgtagaaattaccttcctcttcggactcgatatccacgacgtcaaagtcgtgggcggtcagcgagacgacctccccgtcgtcggtgatgaggacgttgtttcggcagcagcagggccgggtcccggagaacgagaggcccatagctcggcgagcgtgtcgtcgaacgccaggcggctgcttcgctgtatggccttatagatctccggatcgatgcggacgggggtaatgatcagggcgatcggaacggcctggttcgggagaatggacgccttgctgggtcctgcggccccgagagccccggcgccgtcctccaggcggaacgttacgccctcctccgcgctagtgcggtgcctgccgataaacgtcaccagatgcgggtggggggggcagtcggggaagtggctgtcgagcacgtagccctgcaccaagatctgcttaaagttcgggtgacgggggttcgcgaagacgggctcgcggcgtaccagatccccggagctccaggacacgggggagatggtgtggcgtccgaggtcgggggcgccaaacagaagcacctccgagacaacgccgctatttaactccaccaaggcccgatccgcggcggagcaccgccttttttcgcccgaggcgtgggcctctgaccaggcctggtcttgcgtgacgagagcctcctccgggccggggacgcgcccgggcgcgaagtatcgcacgctgggtttcgggatcgaccggataaatgcccggaacgcctccggggaccggtgtgccatcaagtcctcgtacgcggaggccgtggggtcgctggggtccatggggtcgaaagcgtacttggcccggcatttgacctcgtaaaaggccaggggggtcttggggactggggccaagtagccgtgaatgtcccgaggacagacgagaatatccagggacgccccgaccatccccgtgtgaccgtccatgaggaccccacacgtatgcacgttctcttcggcgaggtcgccgggttcgtggaagataaagcgccgcgtgtcggcgccggcctcgccgccgtcgtccgcgcggcccacgcagtagcgaaacagcaggcttcgggccgtcggctcgttcacccgcccgaacatcaccgccgaagactgtacatccggccgcaggctggcgttgtgcttcagccactggggcgagaaacacggaccctgggggccccagcggagggtggatgcggtcgtgaggccccgccggagcagggcccatagctggcagtcggcctggttttgcgtggccgcctcgtaaaaccccatgaggggccggggcgccacggcgtccgcggcggccgggggcccgcggcgcgtcaggcgccataggtgccggccgagtccgcggtccaccatacccgcctcctcgaggaccacggccagggaacacagataatccaggcgggcccagaggggaccgatggccagaggggcgcggacgccgcgcagcaacccgcgcaggtggcgctcgaacgtctcggctagtatatgggagggcagcgcgttggggatcaccgacgccgaccacatagagtcaaggtccggggagtcgggatcggcgtccgggtcgcgggcgtgggtgcccccaggagatagcggaatgtctggggtcggaggccctgaggcgtcagaaagtgccggcgacgcggcccggggcttttcgtctgcggtgtcggtggcgtgctgatcacgtggggggttaacgggcgaatgggagctcgggtccacagctgacgtcgtctggggtggggggggcaggggacggaaggtggttgttagcggaagactgttagggcgggggcgcttgggggggctgtcggggccacgaggggtgtcctcggccagggcccaggaacgcttagtcacggtgcgtcccggcggacatgctgggcctcccgtggactccatttccgagacgacgtggggggagcggtggttgagcgcgccgccgggtgaacgctgattctcacgacagcgcgtgccgcgcgcacgggttggtgtgacacaggcgggacaccagcaccaggagaggcttaagctcgggaggcagcgccaccgacgacagtatcgccttgtgtgtgtgctggtaatttatacaccgatccgtaaacgcgcgccgaatcttgggattgcggaggtggcgccggatgccctctgggacgtcatacgccaggccgtgggtgttggtctcggccgagttgacaaacagggctgggtgcagcacgcggcgataggcgagcagggccagggcgaagtccagcgacagctggttgttgaaatactggtaaccgggaaaccgggtcacgggtacgcccaggctcggggcgacgtacacgctaaccaccaactccagcagcgtctggccaagggcgtacaggtcaaccgctaacccgacgtcgtgcttcaggcggtggttggtaaattcggcccgttcgttgttaaggtatttcaccaacagctccgggggctggttatacccgtgacccaccagggtgtgaaagttggctgtggttagggcggtgggcatgccaaacatccggggggacttgaggtccggctcctggaggcaaaactgcccccgggcgatcgtggagttggagttgagggtgacgaggctaaagtcggcgaggacggcccgccggagcgagacggcgtccgaccgcagcatgacgaggatgttggcgcacttgatatccaggtggctgatcccgcaggtggtgtttaaaaacacaacggcgcgggccagctccgtgaagcactggtggagggccgtcgagaccgaggggtttgttgtgcgcagggacgccagttggccgatatacttaccgaggtccatgtcgtacgcggggaacactatctgtcgttgttgcagcgagaacccgaggggcgcgatgaagccgcggatgttgtgggtgcggccggcgcgtagagcgcactccccgaccaacagggtcgcgatgagctcaacggcaaaccactccttttcctttatggtcttaacggcaagcttatgttcgcgaatcagttggacgtcgccgtatcccccagaccccccgaagcttcgggccccggggatctcgagggtcgtgtagtgtagggcggggttgatggcgaacacggggctgcatagcttgcggatgcgcgtgagggtaaggatgtgcgagggggacgaggggggtgcggttaacgccgcctgggatctgcgcaggggcgggcggttcagtttggccgccgtaccgggcgtctcgggggacgcgcggcgatgagacgagcggctcattcgccatcgggatagtcccgcgcgaagccgctcgcggaggccggatcggtggcgggacccgtgggaggagcgggagccggcggcgtcctggagagaggggccgctggggcgcccggaggccccgtgtgggttggagtgtatgtaggatgcgagccaatccttgaaggactgttggcgtgcaccttgggggctgaggttagctgccacatgaccagcaggtcgctgtctgcgggactcatccatccttcggccaggtcgccgtcttcccacagagaagcgttggtcgctgcttcctcgagttgctcctcctggtccgcaagacgatcgtccacggcgtccaggcgctcaccaagcgccggatcgaggtaccgtcggtgtgcggttagaaagtcacgacgcgccgcttgctcctccacgcgaattttaacacaggtcgcgcgctgtcgcatcatctctaagcgcgcgcgggactttagccgcgcctccaattccaagtgggccgcctttgcagccataaaggcgccaacaaaccgaggatcttgggtgctgacgccctcccggtgcagctgcagggtctggtccttgtaaatctcggctcggaggtgcgtctcggccaggcgtcggcgcagggccgcgtgggcggcatctcggtccattccgccaccctgcgggcgacccggggggtgctctgatagtctcgcgtgcccaaggcccgtgatcggggtacttcgccgccgcgacccgccacccggtgtgcgcgatgtttggtcagcagctggcgtccgacgtccagcagtacctggagcgcctcgagaaacagaggcaacttaaggtgggcgcggacgaggcgtcggcgggcctcacaatgggcggcgatgccctacgagtgccctttttagatttcgcgaccgcgacccccaagcgccaccagaccgtggtcccgggcgtcgggacgctccacgactgctgcgagcactcgccgctcttctcggccgtggcgcggcggctgctgtttaatagcctggtgccggcgcaactaaaggggcgtgatttcgggggcgaccacacggccaagctggaattcctggcccccgagttggtacgggcggtggcgcgactgcggtttaaggagtgcgcgccggcggacgtggtgcctcagcgtaacgcctactatagcgttctgaacacgtttcaggccctccaccgctccgaagcctttcgccagctggtgcactttgtgcgggactttgcccagctgcttaaaacctccttccgggcctccagcctcacggagaccacgggccccccaaaaaaacgggccaaggtggacgtggccacccacggccggacgtacggcacgctggagctgttccaaaaaatgatccttatgcacgccacctactttctggccgccgtgctcctcggggaccacgcggagcaggtcaacacgttcctgcgtctcgtgtttgagatccccctgtttagcgacgcggccgtgcgccacttccgccagcgcgccaccgtgtttctcgtcccccggcgccacggcaagacctggtttctagtgcccctcatcgcgctgtcgctggcctcctttcgggggatcaagatcggctacacggcgcacatccgcaaggcgaccgagccggtgtttgaggagatcgacgcctgcctgcggggctggttcggttcggcccgagtggaccacgttaaaggggaaaccatctccttctcgtttccggacgggtcgcgcagtaccatcgtgtttgcctccagccacaacacaaacgtaagtcctcttttctttcgcatggctctcccaaggggccccgggtcgacccgacccacacccacccacccacatacacacacaaccagacgcgggaggaaagtctgccccgtgggcactgatttttattcgggatcgcttgaggaggcccgggcaacggcccgggcaacggtggggcaactcgtagcaaataggcgactgatgtacgaagagaagacacacaggcgccacccggcgctggtcggggggatgttgtccgcgccgcaccgtcccccgacgacctcttgcagacggtccgtgatgcaaggacggcggggggcctgcagcagggtgaccgtatccacgggatggccaaagagaagcggacacaggctagcatccccctggaccgccagggtacactgggccatcttggcccacagacacggggcgacgcagggacaggactccgttacgacggaggagagccacagtgcgttggcggaatcgatgtggggcggcggggcgcaggactcgcagccccccgggtggttggtgatcctggccaggagccatcccagatggcgggccctgcttcccggtggacagagcgaccccaggtcgctgtccatggcccagcagtagatctggccgctggggaggtgccaccaggcccccgggcccaaggcgcaacacgcgcccggctccgggggggtcttcgcggggaccagatacgcgccatccagctcgccgaccactggctcctccgcgagctgttcggtggttgggtcgggggtttcctccgggggggtggccgcccgtatgcgggcgaacgtgagggtgcacaggagcggggtcagggggtgcgtcacgctccggaggtggacgatcgcgcagtagcggcgctcgcggttaaagaaaaagagggcaaagaaggtgttcgggggcaaccgcagcgccttggggcgcgtcagatacagaaaaatctcgcagaagagggcgcgcccggggtctgggttaggaagggccacctgacacagaggctcggtgaggaccgttagacaccgaaagatcttgagccgctcgtccgcccgaacgacgcgccacacaaagacggagttgacaatgcgcgcgatagagtcgacgtccgtccccaggtcgtcgactctgtcgcgcgtgccgcgagctccggcccgggaatccggccggggcaaggtccccgggggaccaggcggcgccaggggccgccggggtcccagctgcgccatgccgggggcggggggagggcaaaccccagaggcgggggccaacggcgcggggaggagtgggtgggcgaggtggccgggggaaggcgcccgctagcgagaacggccgttcccggacgacaccttgcgacaaaacctaaggacagcggcccgcgcgacggggtccgagaggctaaggtaggccgcgatgttaatggtgaacgcaaagccgccgggaaagacaactatgccacagaggcggcgattaaaccccaggcagaggtaggcgtagctttccccgggcaggtattgctcgcagaccctgcgtggggctgtggaggggacggcctccatgaagcgacatttactctgctcgcgtttactgacgtcaccatccatcgccacggcgattggacgattgttaagccgcagcgtgtctccgcttgtgctgtagtagtcaaaaacgtaatggccgtcggagtcggcaaagcgggccgggaggtcgtcgccgagcgggacgacccgccgcccccgaccgccccgtccccccaggtgtgccaggacggccagggcatacgcggtgtgaaaaaaggcgtcgggggcggtcccctcgacggcgcgcatcaggttctcgaggagaatggggaagcgcctggtcacctcccccagccacgcgcgttggtcggggccaaagtcatagcgcaggcgctgtgagattcgagggccgccctgaagcgcggcccggatggcctggcccagggcccggaggcacgccagatgtatgcgcgcagtaaaggcgacctcggcggcgatgtcaaagggcggcaggacggggcgcgggtggcgcaggggcacctcgagcgcgggaaagcggagcagcagctccgcctgcccagcgggagacagctggtgggggcgcacgacgcgttctgcggcgcaggcctcggtcagggccgtggccagcgccgaggacagcagcggagggcgggcgcgtcgcccgccccacgccacggagttctcgtaggagacgacgacgaagcgctgtttggttccgtagtggtggcgcaggaccacggagatagaacgacggctccacagccagtccggccggtcgccgccggccagggcttcccatccgcgatccaaccactcgaccagcgaccgcggctttgcggtaccaggggtcagggttagaacgtcgttcaggatgtcctcgcccccgggcccgtggggcactggggccacaaagcggcccccgcctgggggctccagacccgccaacaccgcatctgcgtcagccgcccccatggcgcccccgctgacggcctggtgaaccagggcgccctggcggagccccgatgcaacgccacaggccgcacgcccggtccgagcgcggaccgggtggcggcgggtgacgtcctgcactgcccgctgaaccaacgcgaggatctcctcgttctcctgcgcgatggacacgtcctgggccgcggtcgtgtcgccgccgggggccgtcagctgctcctccggggagatgggggggtcggacgccccgacgatgggcgggtctgcgggcgcccccgcgtggggccgggccaagggctgcggacgcggggacgcgctttcccccagacccatggacaggtgggccgcagcctccttcgcggccggcggggcggcggcgccaagcagagcgacgtagcggcacaaatgccgacagacgcgcatgatgcgcgtgctgtcggccgcgtagcgcgtgttgggggggacgagctcgtcgtaactaaacagaatcacgcgggcacagctcgcccccgagccccacgcaaggcgcagcgccgccacggcgtacgggtcatagacgccctgtgcgtcacacaccacgggcaaggagacgaacaaccccccggcgctggacgcacgcggaaggaggccagggtgtgccggcacgacgggggccagaagctcccccaccgcatccgcgggcacgtaggcggcaaacgccgtgcaccacggggtacagtcgccggtggcatgagcccgagtctggatttcgacctggaagtttgcggccgtcccgagtccggggcggccgcgcatcagggcggccagagggattcccgcggccgccaggcactcgctggatatgatgacgtgaaccaaagacgagggccgacccgggacgtggccgagatcgtactggacctcgttggccaagtgcgcgttcatggttcgggggtgggtgtgggtgtgtaggcgatgcgggtcccccgagtccgcgggaagggcgcgggtttggcgcgcgtatgcgtattcgccaacggaggcgtgcgtgcttatgcgcggcgcgtttcttctgtctccagggaatccgaggccaggactttaacctgctctttgtcgacgaggccaactttattcgcccggatgcggtccagacgattatgggctttctcaaccaggccaactgcaagattatcttcgtgtcgtccaccaacaccgggaaggccagtacgagctttttgtacaacctccgcggggccgccgacgagcttctcaacgtggtgacctatatatgcgatgatcacatgccgcgggtggtgacgcacacaaacgccacggcctgttcttgttatatcctcaacaagcccgttttcatcacgatggacggggcggttcgccggaccgccgatttgtttctggccgattccttcatgcaggagatcatcgggggccaggccagggagaccggcgacgaccggcccgttctgaccaagtctgcgggggagcggtttctgttgtaccgcccctcgaccaccaccaacagcggcctcatggcccccgatttgtacgtgtacgtggatcccgcgttcacggccaacacccgagcctccgggaccggcgtcgctgtcgtcgggcggtaccgcgacgattatatcatcttcgccctggagcacttttttctccgcgcgctcacgggctcggcccccgccgacatcgcccgctgcgtcgtccacagtctgacgcaggtcctggccctgcatcccggggcgtttcgcggcgtccgggtggcggtcgagggaaatagcagccaggactcggccgtcgccatcgccacgcacgtgcacacagagatgcaccgcctactggcctcggagggggccgacgcgggctcgggccccgagcttctcttctaccactgcgagcctcccgggagcgcggtgctgtacccctttttcctgctcaacaaacagaagacgcccgcctttgaacactttattaaaaagtttaactccgggggcgtcatggcctcccaggagatcgtttccgcgacggtgcgcctgcagaccgacccggtcgagtatctgctcgagcagctgaataacctcaccgaaaccgtctcccccaacacggacgtccgtacgtattccggaaaacggaacggcgcctcggatgaccttatggtcgccgtcattatggccatctaccttgcggcccaggccggacctccgcacacattcgctcccatcacacgcgtttcgtgagcgcccaataaacacacccaggtatgctacgcacgaccacggtgtcgcctgttaaggggggggggggaagggggtgttggcgggaagcgtgggaacacgggggattctctcacgaccggcaccagtaccacccccctgtgaacacagaaaccccaacccaaatcccataaacatacgacacacaggcatattttggaatttcttaggtttttatttatttaggtatgctggggtttctccctggatgcccacccccacccccccgtgggtctagccgggccttagggatagcgtataacgggggccatgtctccggaccgcacaacggccgcgccgtcaaaggtgcacacccgaaccacgggagccagggccaaggtgtctcctagttggcccgcgtgggtcagccaggcgacgagcgcctcgtagagcggcagccttcgctctccatcctgcatcagggccggggcttcggggtgaatgagctgggcggcctcccgcgtgacactctgcatctgcaggagagcgttcacgtacccgtcctgggcacttagcgcaaagagccgggggattagcgtaaggatgatggtggttccctccgtgatcgagtaaaccatgttaaggaccagcgatcgcagctcggcgtttacggggccgagttgttggacgtccgccagcagcgagaggcgactcccgttgtagtacagcacgttgaggtctggcagccctccggggtttctggggctggggttcaggtcccggatgcccctggccacgagccgcgccacgatttcgcgcgccaggggcgatggaagcggaacgggaaaccgcaacgtgaggtccagcgaatccaggcgcacgtccgtcgcttggccctcgaacacgggcgggacgaggctgatggggtccccgttacagagatctacgggggaggtgttgcgaaggttaacggtgccggcgtgggtgaggcccacgtccagggggcaggcgacgattcgcgtgggaagcacccgggtgatgaccgcggggaagcgccttcggtacgccagcaacagccccaacgtgtcgggactgacgcctccggagacgaaggattcgtgcgccacgtcggccagcgtcagttgccggcggatggtcggcaggaataccacccgcccttcgcagcgctgcagcgccgccgcatcggggcgcgagatgcccgagggtatcgcgatgtcagtttcaaagccgtccgccagcatggcgccgatccacgcggcagggagtgcagtggtggttcgggtggcgggaggagcgcggtgggggtcagcggcgtagcagagacgggcgaccaacctcgcataggacggggggtgggtcttagggggttgggaggcgacagggaccccagagcatgcgcggggaggtctgtcgggcccagacgcaccgagagcgaatccgtccatggagtcccggcctgggttttatggggcccggccctcggaatcgcggcttgtcggcggggacaaagggggcggggctagggggcttgcggaaacagaagacgtgtgggataaaagaatcgcactaccccaaggaagggcggggcggtttagtttaaac

SEQ ID NO: 12 - DNA, 131108 bp, synthetic construct
  source 1..131108: mol_type = other DNA
ggaatccgaggccaggactttaacctgctctttgtcgacgaggccaactttattcgcccggatgcggtccagacgattatgggctttctcaaccaggccaactgcaagattatcttcgtgtcgtccaccaacaccgggaaggccagtacgagctttttgtacaacctccgcggggccgccgacgagcttctcaacgtggtgacctatatatgcgatgatcacatgccgcgggtggtgacgcacacaaacgccacggcctgttcttgttatatcctcaacaagcccgttttcatcacgatggacggggcggttcgccggaccgccgatttgtttctggccgattccttcatgcaggagatcatcgggggccaggccagggagaccggcgacgaccggcccgttctgaccaagtctgcgggggagcggtttctgttgtaccgcccctcgaccaccaccaacagcggcctcatggcccccgatttgtacgtgtacgtggatcccgcgttcacggccaacacccgagcctccgggaccggcgtcgctgtcgtcgggcggtaccgcgacgattatatcatcttcgccctggagcacttttttctccgcgcgctcacgggctcggcccccgccgacatcgcccgctgcgtcgtccacagtctgacgcaggtcctggccctgcatcccggggcgtttcgcggcgtccgggtggcggtcgagggaaatagcagccaggactcggccgtcgccatcgccacgcacgtgcacacagagatgcaccgcctactggcctcggagggggccgacgcgggctcgggccccgagcttctcttctaccactgcgagcctcccgggagcgcggtgctgtacccctttttcctgctcaacaaacagaagacgcccgcctttgaacactttattaaaaagtttaactccgggggcgtcatggcctcccaggagatcgtttccgcgacggtgcgcctgcagaccgacccggtcgagtatctgctcgagcagctgaataacctcaccgaaaccgtctcccccaacacggacgtccgtacgtattccggaaaacggaacggcgcctcggatgaccttatggtcgccgtcattatggccatctaccttgcggcccaggccggacctccgcacacattcgctcccatcacacgcgtttcgtgagcgcccaataaacacacccaggtatgctacgcacgaccacggtgtcgcctgttaagggggggggaagggggtgttggcgggaagcgtgggaacacgggggattctctcacgaccggcaccagtaccacccccctgtgaacacagaaaccccaacccaaatcccataaacatacgacacacaggcatattttggaatttcttaggtttttatttatttaggtatgctggggtttctccctggatgcccacccccacccccccccgtgggtctagccgggccttagggatagcgtataacgggggccatgtctccggaccgcacaacggccgcgccgtcaaaggtgcacacccgaaccacgggagccagggccaaggtgtctcctagttggcccgcgtgggtcagccaggcgacgagcgcctcgtagagcggcagccttcgctctccatcctgcatcagggccggggcttcggggtgaatgagctgggcggcctcccgcgtgacactctgcatctgcaggagagcgttcacgtacccgtcctgggcacttagcgcaaagagccgggggattagcgtaaggatgatggtggttccctccgtgatcgagtaaaccatgttaaggaccagcgatcgcagctcggcgtttacggggccgagttgttggacgtccgccagcagcgagaggcgactcccgttgtagtacagcacgttgaggtctggcagccctccggggtttctggggctggggttcaggtcccggatgcccctggccacgagccgcgccacgatttcgcgcgccaggggcgatggaagcggaacgggaaaccgcaacgtgaggtccagcgaatccaggcgcacgtccgtcgcttggccctcgaacacgggcgggacgaggctgatggggtccccgttacagagatctacgggggaggtgttgcgaaggttaacggtgccggcgtgggtgaggcccacgtccagggggcaggcgacgattcgcgtgggaagcacccgggtgatgaccgcggggaagcgccttcggtacgccagcaacagccccaacgtgtcgggactgacgcctccggagacgaaggattcgtgcgccacgtcggccagcgtcagttgccggcggatggtcggcaggaataccacccgcccttcgcagcgctgcagcgccgccgcatcggggcgcgagatgcccgagggtatcgcgatgtcagtttcaaagccgtccgccagcatggcgccgatccacgcggcagggagtgcagtggtggttcgggtggcgggaggagcgcggtgggggtcagcggcgtagcagagacgggcgaccaacctcgcataggacggggggtgggtcttagggggttgggaggcgacagggaccccagagcatgcgcggggaggtctgtcgggcccagacgcaccgagagcgaatccgtccatggagtcccggcctgggttttatggggcccggccctcggaatcgcggcttgtcggcggggacaaagggggcggggctagggggcttgcggaaacagaagacgtgtgggataaaagaatcgcactaccccaaggaagggcggggcggtttagtttaaaccagaccccaataaacgtatgtcgctaccacacccttgtgtgtcaatggacgcctctccgggggggaagggaaaacaaagaggggctgggggagcggcaccaccggggcctgaacaaacaaaccacagacacggttacagtttattcggtcgggcggagaaacggccgaagccacgccccctttattcgcgtctccaaaaaaacgggacacttgtccggagaacctttaggatgccagccagggcggcggtaatcataaccacgcccagcgcagaggcggccagaaacccgggcgcaattgcggccacgggctgcgtgtcaaaggctagcaaatgaatgacggttccgtttggaaatagcaacaaggccgtggacggcacgtcgctcgaaaacacgcttggggcgccctccgtcggcccggcggcgatttgctgctgtgtgttgtccgtatccaccagcaacacagacatgacctccccggccggggtgtagcgcataaacacggcccccacgagccccaggtcgcgctggttttgggtgcgcaccagccgcttggactcgatatcccgggtggagccttcgcatgtcgcggtgaggtaggttaggaacagtgggcgtcggacgtcgacgccggtgagcttgtagccgatcccccggggcagaggggagtgggtgacgacgtagctggcgttgtgggtgatgggtaccaggatccgtggctcgacgttggcagactgccccccgcaccgatgtgaggcctcagggacgaaggcgcggatcagggcgttgtagtgtgcccagcgcgtcagggtcgaggcgaggccgtgggtctgctgggccaggacttcgaccggggtctcggatcgggtggcttgagccagcgcgtccaggataaacacgctctcgtctagatcaaagcgcagggaggccgcgcatggcgaaaagtggtccggaagccaaaagagggttttctggtggtcggcccgggccagcgcggtccggaggtcggcgttggtcgctgcggcgacgtcggacgtacacagggccgaggctatcagaaggctccggcgggcgcgttcccgctgcaccgccgaggggacgcccgccaagaacggctgccggaggacagccgaggcgtaaaatagcgcccggtggacgaccggggtggtcagcacgcggccccctagaaactcggcatacagggcgtcgatgagatgggctgcgctgggcgccactgcgtcgtacgccgaggggctatccagcacgaaggccagctgatagcccagcgcgtgtaatgccaagctctgttcgcgctccagaatctcggccaccaggtgctggagccgagcctctagctgcaggcgggccgtgggatccaagactgacacattaaaaaacacagaatccgcggcacagcccgcggccccgcgggcggccaacccggcaagcgcgcgcgagtgggccaaaaagcctagcaggtcggagaggcagaccgcgccgtttgcgtgggcggcgttcacgaaagcaaaacccgacgtcgcgagcagccccgttaggcgccagaagagagggggacgcgggccctgctcggcgcccgcgtcccccgagaaaaactccgcgtatgcccgcgacaggaactgggcgtagttcgtgccctcctccgggtagccgcccacgcggcggagggcgtccagcgcggagccgttgtcggcccgcgtcagggaccctaggacaaagacccgataccgggggccgcccgggggcccgggaagagcccccggggggttttcgtccgcggggtccccgacccgatctagcgtctggcccgcggggaccaccatcacttccaccggagggctgtcgtgcatggatatcacgagccccatgaattcccgcccgtagcgcgcgcgcaccagcgcggcatcgcacccgagcaccagctcccccgtcgtccagatgcccacgggccacgtcgaggccgacggggagaaatacacgtacctacctggggatctcaacaggccccgggtggccaaccaggtcgtggacgcgttgtgcaggtgcgtgatgtccagctccgtcgtcgggtgccgccgggccccaaccggcggtcgggggggcggtgtatcacgcggcccgctcgggtggctcgccgtcgccacgttgtctccccgcgggaacgtcagggcctcggggtcagggacggccgaaaacgttacccaggcccgggaacgcagcaacacggaggcggttggattgtgcaagagacccttaaggggggcgaccgcggggggaggctgggcggtcggctcgaccgtgatgggggcgggcaggctcgcgttcgggggccggccgagcaggtaggtcttcgagatgtaaagcagctggccggggtcccgcggaaactcggccgtggtgaccaatacaaaacaaaagcgctcctcgtaccagcgaagaaggggcagagatgccgtagtcaggtttagttcgtccggcggcgccagaaatccgcgcggtggtttttgggggtcgggggtgtttggcagccacagacgcccggtgttcgtgtcgcgccagtacatgcggtccatgcccaggccatccaaaaaccatgggtctgtctgctcagtccagtcgtggacctgaccccacgcaacgcccaaaagaataacccccacgaaccataaaccattccccatgggggaccccgtccctaacccacggggcccgtggctatggcagggcttgccgccccgacgttggctgcgagccctgggccttcacccgaacttgggggttggggtggggaaaaggaagaaacgcgggcgtattggccccaatggggtctcggtggggtatcgacagagtgccagccctgggaccgaaccccgcgtttatgaacaaacgacccaacacccgtgcgttttattctgtctttttatttccgtcatagcgcgggttccttccggtattgtctccttccgtgtttcagttagcctcccccatctcccgggcaaacgtgcgcgccaggtcgcagatcgtcggtatggagcctggggtggtgacgtgggtctggaccatcccggaggtaagttgcagcagggcgtcccggcagccggcgggcgattggtcgtaatccaggataaagacgtgcatgggacggaggcgtttggccaagacgtccaaggcccaggcaaacacgttatacaggtcgccgttgggggccagcaactcgggggcccgaaacagggtaaataacgtgtccccgatatggggtcgtgggcccgcgttgctctggggctcggcaccctggggcggcacggccgtccccgaaagctgtccccaatcctcccgccacgacccgccgccctgcagataccgcaccgtattggcaagcagcccgtaaacgcggcgaatcgcggccaacatagccaggtcaagccgctcgccggggcgctggcgtttggccaggcggtcgatgtgtctgtcctccggaagggcccccaacacgatgtttgtgccgggcaaggtcggcgggatgagggccacgaacgccagcacggcctggggggtcatgctgcccataaggtatcgcgcggccgggtagcacaggagggcggcgatgggatggcggtcgaagatgagggtgagggccgggggcggggcatgtgagctcccagcctcccccccgatatgaggagccagaacggcgtcggtcacggcataaggcatgcccattgttatctgggcgcttgtcattaccaccgccgcgtccccggccgatatctcaccctggtcgaggcggtgttgtgtggtgtagatgttcgcgattgtctcggaagcccccagcacctgccagtaagtcatcggctcgggtacgtagacgatatcgtcgcgcgaacccagggccaccagcagttgcgtggtggtggttttccccatcccgtgaggaccgtctatataaacccgcagtagcgtgggcattttctgctccaggcggacttccgtggcttcttgctgccggcgagggcgcaacgccgtacgtcggttgctatggccgcgagaacgcgcagcctggtcgaacgcagacgcgtgttgatggcaggggtacgaagccatacgcgcttctacaaggcgcttgccaaagaggtgcgggagtttcacgccaccaagatctgcggcacgctgttgacgctgttaagcgggtcgctgcagggtcgctcggtgttcgaggccacacgcgtcaccttaatatgcgaagtggacctgggaccgcgccgccccgactgcatctgcgtgttcgaattcgccaatgacaagacgctgggcggggtttgtgtcatcatagaactaaagacatgcaaatatatttcttccggggacaccgccagcaaacgcgagcaacgggccacggggatgaagcagctgcgccactccctgaagctcctgcagtccctcgcgcctccgggtgacaagatagtgtacctgtgccccgtcctggtgtttgtcgcccaacggacgctccgcgtcagccgcgtgacccggctcgtcccgcagaaggtctccggtaatatcaccgcagtcgtgcggatgctccagagcctgtccacgtatacggtccccatggagcctaggacccagcgagcccgtcgccgccgcggcggcgctgcccgggggtctgcgagcagaccgaaaaggtcacactctggggcgcgcgacccgcccgagccagcggcccgccaggtaccacccgccgaccaaacccccgcctccacggagggcgggggggtgcttaagaggatcgcggcgctcttctgcgtgcccgtggccaccaagaccaaaccccgagctgcctccgaatgagagtgtttcgttccttccccctccccccgcgtcagacaaaccctaaccaccgcttaagcggcccccgcgaggtccgaagactcatttggatccggcgggagccacctgacaacagcccccgggtttccccacgccagacgccggtccgctgtgccatcgctccccttcatcccacccccatcttgtccccaaataaaacaaggtctggtagttaggacaacgaccgcagttctcgtgtgttattgtcgctctccgcctctcgcagatggacccgtattgcccatttgacgctctggacgtctgggaacacaggcgcttcatagtcgccgattcccgaaacttcatcacccccgagttcccccgggacttttggatgtcgcccgtctttaacctcccccgggagacggcggcggagcaggtggtcgtcctgcaggcccagcgcacagcggctgccgctgccctggagaacgccgccatgcaggcggccgagctccccgtcgatatcgagcgccggttacgcccgatcgaacggaacgtgcacgagatcgcaggcgccctggaggcgctggagacggcggcggccgccgccgaagaggcggatgccgcgcgcggggatgagccggcgggtgggggcgacgggggggcgcccccgggtctggccgtcgcggagatggaggtccagatcgtgcgcaacgacccgccgctacgatacgacaccaacctccccgtggatctgctacatatggtgtacgcgggccgcggggcgaccggctcgtcgggggtggtgttcgggacctggtaccgcactatccaggaccgcaccatcacggactttcccctgaccacccgcagtgccgactttcgggacggccggatgtccaagaccttcatgacggcgctggtcctgtccctgcagtcgtgcggccggctgtatgtgggccagcgccactattccgccttcgagtgcgccgtgttgtgtctctacctgctgtaccgaaacacgcacggggccgccgacgatagcgaccgcgctccggtcacgttcggggatctgctgggccggctgccccgctacctggcgtgcctggccgcggtgatcgggaccgagggcggccggccacagtaccgctaccgcgacgacaagctccccaagacgcagttcgcggccggcgggggccgctacgaacacggagcgctggcgtcgcacatcgtgatcgccacgctgatgcaccacggggtgctcccggcggccccggggggcgtcccccgggacgcgagcacccacgttaaccccgacggcgtggcgcaccacgacgacataaaccgcgccgccgccgcgttcctcagccggggccacaacctattcctgtgggaggaccagactctgctgcgggcaaccgcgaacaccataacggccctgggcgttatccagcggctcctcgcgaacggcaacgtgtacgcggaccgcctcaacaaccgcctgcagctgggcatgctgatccccggagccgtcccttcggaggccatcgcccgtggggcctccgggtccgactcgggggccatcaagagcggagacaacaatctggaggcgctatgtgccaattacgtgcttccgctgtaccgggccgacccggcggtcgagctgacccagctgtttcccggcctggccgccctgtgtcttgacgcccaggcggggcggccggtcgggtcgacgcggcgggtggtggatatgtcatcgggggcccgccaggcggcgctggtgcgcctcaccgccctggaactcatcaaccgcacccgcacaaaccccacccccgtgggggaggttatccacgcccacgacgccctggcgatccaatacgaacaggggcttggcctgctggcgcagcaggcacgcattggcttgggctccaacaccaagcgtttctccgcgttcaacgttagcagcgactacgacatgttgtactttttatgtctggggttcattccacagtacctgtcggcggtttagtgggtggtgggcgaggggggagggggcattagggagaaagaacaagagcctccgttgggttttctttgtgcctgtactcaaaaggtcataccccgtaaacggcgggctccagtcccggcccggcggttggcgtgaacgcaacggcgggagctgggttagcgtttagtttagcattcgctctcgcctttccgcccgcccccgaccgttgagcctttttcgtccaccaaagtctctgtgggtgcgcgcatggcagccgatgccccgggagaccggatggaggagcccctgccagacagggccgtgcccatttacgtggctgggtttttggccctgtatgacagcggggactcgggcgagttggcattggatccggatacggtgcgggcggccctgcctccggataacccactcccgattaacgtggaccaccgcgctggctgcgaggtggggcgggtgctggccgtggtcgacgacccccgcgggccgttttttgtgggactgatcgcctgcgtgcaactggagcgcgtcctcgagacggccgccagcgctgcgattttcgagcgccgcgggccgccgctctcccgggaggagcgcctgttgtacctgatcaccaactacctgccctcggtctccctggccacaaaacgcctggggggcgaggcgcaccccgatcgcacgctgttcgcgcacgtagcgctgtgcgcgatcgggcggcgccttggcactatcgtcacctacgacaccggtctcgacgccgccatcgcgccctttcgccacctgtcgccggcgtctcgcgagggggcgcggcgactggccgccgaggccgagctcgcgctatccggacgcacctgggcgcccggcgtggaggcgctgacccacacgctgctttccaccgccgttaacaacatgatgctgcgggaccgctggagcctggtggccgagcggcggcggcaggccgggatcgccggacacacctacctccaggcgagcgaaaaattcaaaatgtggggggcggagcctgtttccgcgccggcgcgcgggtataagaacggggccccggagtccacggacataccgcccggctcgatcgctgccgcgccgcagggtgaccggtgcccaatcgtccgtcagcgcggggtcgcctcgcccccggtactgccccccatgaaccccgttccaacatcgggcaccccggcccccgcgccgcccggcgacgggagctacctgtggatcccggcctcccattacaaccagctcgtcgccggccacgccgcgccccaaccccagccgcattccgcgtttggtttcccggctgcggcgggggccgtggcctatgggcctcacggcgcgggtctttcccagcattaccctccccacgtcgcccatcagtatcccggggtgctgttctcgggacccagcccactcgaggcgcagatagccgcgttggtgggggccatagccgcggaccgccaggcgggcggtcagccggccgcgggagaccctggggtccgggggtcgggaaagcgtcgccggtacgaggcggggccgtcggagtcctactgcgaccaggacgaaccggacgcggactacccgtactaccccggggaggctcgaggcgggccgcgcggggtcgactctcggcgcgcggcccgccagtctcccgggaccaacgagaccatcacggcgctgatgggggcggtgacgtctctgcagcaggaactggcgcacatgcgggctcggaccagcgccccctatggaatgtacacgccggtggcgcactatcgccctcaggtgggggagccggaaccaacaacgacccacccggccctttgtcccccggaggccgtgtatcgccccccaccacacagcgccccctacggtcctccccagggtccggcgtcccatgcccccactcccccgtatgccccagctgcctgcccgccaggcccgccaccgcccccatgtccttccacccagacgcgcgcccctctaccgacggagcccgcgttcccccccgccgccaccggatcccaaccggaggcatccaacgcggaggccggggcccttgtcaacgccagcagcgcagcacacgtggacgttgacacggcccgcgccgccgatttgttcgtctctcagatgatgggggcccgctgattcgccccggtctttggtaccatgggatgtcttactgtatatctttttaaataaaccaggtaataccaaataagacccattggtgtatgttcttttttttttattgggaggggcgggtaggcgggtagctttacaatgcaaaagcctttgacgtggaggaaggcgtgggggggaggaaatcggcactgaccaagggggtccgttttgtcacgggaaaggaaagaggaaacaggccgcggacacccgggggagtttatgtgttcctttttctttcttcccacacacacacaaaaggcgtaccaaacaaaaaaaccaaaagatgcgcatgcggtttaacacccgtggtttttatttacaacaaaccccccgtcacaggtcgtcctcgtcggcgtcaccgtctttgttgggaacttgggtgtagttggtgttgcggcgcttgcgcatgaccatgtcggtgaccttggcgctgagcagcgcgctcgtgcccttcttcttggccttgtgttccgtgcgctccatggccgacaccagggccatgtaccgtatcatctccctggcctcggctagcttggcctcgtcaaagtcgccgccctcctcgccctccccggacgcgtccgggttggtggggttcttgagctccttggtggttagagggtacagggccttcatggggttgctctgcagccgcatgacgtaacgaaaggcgaagaaggccgccgccaggccggccaggaccaacagacccacggccagcgccccaaaggggttggacatgaaggaggacacgcccgacacggccgataccacgccgcccacgatgcccatcaccaccttgccgaccgcgcgccccaggtcgcccatcccctcgaagaacgcgcccaggcccgcgaacatggcggcgttggcgtcggcgtggatgaccgtgtcgatgtcggcgaagcgcaggtcgtgcagctggttgcggcgctggacctccgtgtagtccagcaggccgctgtccttgatctcgtggcgggtgtacacctccagggggacaaactcgtgatcctccagcatggtgatgttgaggtcgatgaaggtgctgacggtggtgatgtcggcgcggctcagctggtgggagtacgcgtactcctcgaagtacacgtagcccccaccgaaggtgaagtagcgccggtgtcccacggtgcacggctcgatcgcatcgcgcgtcagccgcagctcgttgttctcccccagctgcccctcgaccaacgggccctggtcttcgtaccgaaagctgaccagggggcggctgtagcaggccccgggccgcgagctgatgcgcatcgagttttggacgatcacgttgtccgcggcgaccggcacgcacgtggagacggccatcacgtcgccgagcatccgcgcgctcacccgccggcccacggtgaccgaggcgatgatgttggggttcagcttgcgggcctcgttccacagggtcagctcgtgattctgtagctcgcaccacgcgatggcaacgcggcccaacatatcgttgacatggcgctgtatgtggttgtacgtaaactgcagccgggcgaactcgatggaggaggtggtcttgatgcgctccacggacgcgttggcgctggccccgggcggcgggggcgtggggtttgggggcttgcggctctgctctcggaggtgttcccgcacgtacagctccgcgagcgtgttgctgagaaggggctggtacgcgatcagaaagcccccattggccaggtagtactgcggctggcccaccttgatgtgcgtcgcgttgtacctgcgggcgaagatgcggtccatggcgtcgcgggcgtccttgccgatgcagtcccccaggtccacgcgcgagagcgggtactcggtcaggttggtggtgaaggtggtggatatggcgtcggaggagaatcggaaggagccgccgtactcggagcgcagcatctcgtccacttcctgccacttggtcatggtgcagaccgacgggcgctttggcacccagtcccaggccacggtgaacttgggggtcgtgagcaggttccgggtggtcggcgccgtggcccgggccttggtggtgaggtcgcgcgcgtagaagccgtcgacctgcttgaagcggtcggcggtgtagctggtgtgttcggtgtgcgacccctcccggtagccgtaaaacggggacatgtacacaaagtcgccagtcgccagcacaaactcgttgtacgggtacaccgagcgcgcgtccacctcctcgacgatgcagtttaccgtcgtcccgtaccggtggaacgcctccacccgcgaggggttgtacttgaggtcggtggtgtgccagccccggctcgtgcgggtcgcggcgttggccggtttcagctccatgtcggtctcgtggtcgtcccggtgaaacgcggtggtctccaggttgttgcgcacgtacttggccgtggaccgacagacccccttggcgttgatcttgtcgatcacctcctcgaaggggacgggggcgcggtcctcaaagatccccataaactgggagtagcggtggccgaaccacacctgcgaaacggtgacgtctttgtagtacatggtggccttgaacttgtacggggcgatgttctccttgaagaccaccgcgatgccctccgtgtagttctgaccctcgggccgggtcgggcagcggcgcggctgctcgaactgcaccaccgtggcgcccgtggggggtgggcacacgtaaaagtttgcatcggtgttctccgccttgatgtcccgcaggtgctcgcgcagggtggcgtggcccgcggcgacggtcgcgttgtcgccggcggggcgtggtggcgttgggtttttcggttttttgttcttcttcggtttcgggtcccccgttggggcggcgccaagggcgggcggcgccggagtggcagggcccccgttcgccgcctgggtcgcggccgcgaccccaggcgtgccgggggaactcggagccgccgacgccaccaggacccccagcgtcaaccccaagagcgcccatacgacgaaccaccggcgcccccacgagggggcgccctggtgcatggcgggactacgggggcccgtcgtgccccccgtcaggtagcctgggggcgaggtgctggaggaccgagtagaggatcgagaaaacgtcgcggtcgtagaccacgaccgaccgggggccgatacagccgtcgggggcgctctcgacgatggccaccagcggacagtcggagtcgtacgtgagatatacgccgggcgggtaacggtaacgaccttcggaggtcgggcggctgcagtccgggcggcgcaactcgagctccccgcaccggtagaccgaggcaaagagtgtggtggcgataatcagctcgcgaatatatcgccaggcggcgcgctgagtgggcgttattccggaaatgccgtcaaaacagtaaaacctctgaaattcgctgacggcccaatcagcacccgagccccccgcccccatgatgaaccgggcgagctcctccttcaggtgcggcaggagccccacgttctcgacgctgtaatacagcgcggtgttggggggctgggcgaagctgtgggtggagtgatcaaagaggggcccgttgacgagctcgaagaagcgatgggtgatgctggggagcagggccgggtccacctggtgtcgcaggagagacgctcgcatgaaccggtgcgcgtcgaacacgcccggcgccgagcggttgtcgatgaccgtgcccgcgcccgccgtcagggcgcagaagcgcgcgcgcgccgcaaagccgttggcgaccgcggcgaacgtcgcgggcagcacctcgccgtggacgctgacccgcagcatcttctcgagctccccgcgctgctcgcggacgcagcgccccaggctggccaacgaccgcttcgtcaggcggtccgcgtacagccgccgtcgctcccgtacgtccgcggccgcttgcgtggcgatgtccccccacgtctcgggcccctgccccccgggcccgcggcgacggtcttcgtcctcgcccccgcccccgggagctcccaacccccgtgccccttcctctacagcgacacggtccccgtcgtcgtcggggcccgcgccgcccttgggcgcgtccgccgcgccccccgcccccatgcgcgccagcacgcgacgcagcgcctcctcgtcgcactgttcggggctgacgaggcgccgcaagagcggcgtcgtcaggtggtggtcgtagcacgcgcggatgagcgcctcgatctgatcgtcgggtgacgtggcctgaccgccgattattagggcgtccaccatatccagcgccgccaggtggctcccgaacgcgcgatcgaaatgctccgcccgccgcccgaacagcgccagttccacggccaccgcggcggtctcctgctgcaactcgcgccgcgccagcgcggtcaggttgctggcaaacgcgtccatggtggtctggccggcgcggtcgccggacgcgagccagaatcgcaattcgctgatggcgtacaggccgggcgtggtggcctgaaacacgtcgtgcgcctccagcagggcgtcggcctccttgcggaccgagtcgttctcgggcgacgggtggggctgcccgtcgccccccgcggtccgggccagcgcatggtccaacacggagagcgcccgcgcgcggtcggcgtccgacagcccggcggcgtggggcaggtaccgccgcagctcgttggcgtccagccgcacctgcgcctgctgggtgacgtggttacagatacggtccgccaggcggcgggcgatcgtcgccccctggttcgccgtcacacacagttcctcgaaacagaccgcgcaggggtgggacgggtcgctaagctccggggggacgataaggcccgaccccaccgcccccaccataaactcccgaacgcgctccagcgcggcggtggcgccgcgcgagggggtgatgaggtggcagtagtttagctgctttagaaagttctcgacgtcgtgcaggaaacacagctccatatggacggtcccgccatacgtatccagcctgacccgttggtgatacggacagggtcgggccaggcccatggtctcggtgaaaaacgccgcgacgtctcccgcggtcgcgaacgtctccaggctgcccaggagccgctcgccctcgcgccacgcgtactctagcagcaactccagggtgaccgacagcggggtgagaaaggccccggcctgggcctccaggcccggcctcagacgacgccgcagcgcccgcacctgaagcgcgttcagcttcagttgggggagcttcccccgtccgatgtgggggtcgcaccgccggagcagctctatctgaaacacataggtctgcacctgcccgagcagggctaacaacttttgacgggccacggtgggctcggacaccggggcggccatctcgcggcgccgatctgtaccgcggccggagtatgcggtggaccgaggcggtccgtacgctacccggtgtctggctgagccccggggtccccctcttcggggcggcctcccgcgggcccgccgaccggcaagccgggagtcggcggcgcgtgcgtttctgttctattcccagacaccgcggagaggaatcacggcccgcccagagatatagacacggaacacaaacaagcacggatgtcgtagcaataatttattttacacacattccccgccccgccctaggttcccccaccccccaacccctcacagcatatccaacgtcaggtctccctttttgtcggggggcccctccccaaacgggtcatccccgtggaacgcccgtttgcggccggcaaatgccggtcccggggcccccgggccgccgaacggcgtcgcgttgtcgtcctcgcagccaaaatccccaaagttaaacacctccccggcgttgccgagttggctgactagggcctcggcctcgtgcgccacctccagggccgcgtccgtcgaccactcgccgttgccgcgctccagggcacgcgcggtcagctccatcatctcctcgcttaggtactcgtcctccaggagcgccagccagtcctcgatctgcagctgctgggtgcggggccccaggcttttcacggtcgccacgaacacgctactggcgacggccgccccgccctcggagataatgccccggagctgctcgcacagcgagctttcgtgcgctccgccgccgaggttcgaggccgcgcacacaaacccggcccggggacaggccaggacgaacttgcgggtgcggtcaaaaataaggagcgggcacgcgtttttgccgcccatcaggctggcccagttcccggcctgaaacacacggtcgttgccggccatgccgtagtatttgctgatgctcaaccccaacacgaccatggggcgcgccgccatgacgggccgcagcaggttgcagctggcgaacatggacgtccacgcgcccggatgcgcgtccacggcgtccatcagcgcgcgggccccggcctccaggcccgccccgccctgcgcggaccacgcggccgccgcctgcacgctggggggacggcgggaccccgcgatgatggccgtgagggtgttgatgaagtatgtcgagtgatcgcagtaccgcagaatctggtttgccatgtagtacatcgccagctcgctcacgttgttgggggccaggttaataaagtttatcgcgccgtagtccagggaaaactttttaatgaacgcgatggtctcgatgtcctcgcgcgacaggagccgggcgggaagctggttgcgttggagggccgtccagaaccactgcgggttcggctggttggaccccgggggcttgccgttggggaagatggccgcgtggaactgcttcagcagaaagcccagcggtccgaggaggatgtccacgcgcttgtcgggcttctggtaggcgctctggaggctggcgacccgcgccttggcggcctcggacgcgttggcgctcgcgcccgcgaacaacacgcggctcttgacgcgcagctccttgggaaaccccagggtcacgcgggcaacgtcgccctcgaagctgctctcggcgggggccgtctggccggccgttaggctgggggcgcagatagccgccccctccgagagcgcgaccgtcagcgttttggccgacagaaacccgttgttaaacatgtccatcacgcgccgccgcagcaccggttggaattgattgcgaaagttgcgcccctcgaccgactgcccggcgaacaccccgtggcactggctcagggccaggtcctgatacacggcgaggttggatcgccgcccgagaagctgaagcagggggcatggcccgcacgcgtacgggtccagcgtcagggacatggcgtggttggcctcgcccagaccgtcgcgaaacttgaagttcctcccctccaccaggttgcgcatcagctgctccacctcgcggtccacgacctgcctgacgttgttcaccaccgtatgcagggcctcgcggttggtgatgatggtctccagccgccccatggccgtggggaccgcctggtccacgtactgcagggtctcgagttcggccatgacgcgctcggtcgccgcgcggtacgtctcctgcatgatggtccgggcggtctcggatccgtccgcgcgcttcagggccgagaaggcggcgtagtttcccagcacgtcgcagtcgctgtacatgctgttcatggtcccgaagacgccgatggctccgcgggcggcgctggcgaacttgggatggcgcgcccggaggcgcatgagcgtcgtgtgtacgcaggcgtggcgcgtgtcgaaggtgcacaggttgcagggcacgtcggtctggttggagtccgcgacgtatcgaaacacgtccatctcctggcgcccgacgatcacgccgccgtcgcagcgctccaggtaaaacagcatcttggccagcagcgccggggaaaacccacacagcatggccaggtgctcgccggcaaattcctgggttccgccgacgaggggcgcggtgggccgaccctcgaacccgggcaccacgtgtccctcgcggtccacctgtgggttggccgccacgtgggtcccgggcacgaggaagaagcggtaaaaggagggtttgctgtggtcctttgggtccgccggaccggcgtcgtccacctcggtgagatggagggccgagttggtgctaaataccatggcccccacgagtcccgcggcgcgcgccaggtacgccccgacggcgttggcgcgggccgcggccgtgtcctggccctcgcacagcggccacgcggagatgtcggtgggcggctcgtcgaagacggccatcgacacgatagactcgagggccagggcggcgtctccggccatgacggaggccaggcgctgttcgaacccgcccgccgggcccttgccgccgccgtcgcgcccaccccgcggggtcttaccctggctggcttcgaaggccgtgaacgtaatgtcggcggggagggcggcgccctcgtggttttcgtcaaacgccaggtgggcggccgcgcgggccacggcgtccacgtttcggcatcgcagtgccacggcggcgggtcccacgaccgcctcgaacaggaggcggttgagggggcggttaaaaaacggaagcgggtaggtaaaattctccccgatcgatcggtggttggcgttgaacggctcggcgatgacccggctaaaatccggcatgaacagctgcaacggatacacgggtatgcggtgcacctccgccccgcctatggttaccttgtccgagcctcccaggtgcagaaaggtgttgttgatgcacacggcctccttgaagccctcggtaacgaccagatacaggagggcgcggtccgggtccaggccgaggcgctcacacagcgcctcccccgtcgtctcgtgtttgaggtcgccgggccggggggtgtagtccgaaaagccaaaatggcggcgtgcccgctcgcagagtcgcgtcaggtttggggcctgggtgctggggtccaggtgccggccgccgtgaaagacgtacacggacgagctgtagtgcgatggcgtcagtttcagggacaccgcggtacccccgagccccgtcgtgcgagaacccacgaccacggctacgttggcctcaaagccgctctccacggtcaggcccacgaccaggggcgccacggcgacgtcggcatcgccgctgcgcgccgacagtaacgccagaagctcgatgccttcggacggacacgcgcgagcgtacacgtatcccaggggcccgggggggaccttgatggtggttgccgtcttgggctttgtctccatgtcctcctggcaatcggtccgcaaacggaggtaatcccggcacgacgacggacgcccgacgaggtatgtctcccgagcgtcaaaatccgggggggggggggcggcgacggtcaaggggagggtgggagaccggggttggggaatgaatccctacccttcacagacaacccccgggtaaccacggggtgccgatgaaccccggcggctggcaacgcggggtccctgcgagaggcacagatgcttacggtcaggtgctccgggccgggtgcgtctgatatgcggttggtatatgtacactttacctgggggcgtgccggaccgccccagcccctcccacaccccgcgcgtcatcagccggtgggcgtggccgctattataaaaaaagtgagaacgcgaagcgttcgcactttttttataatagcggccacgcccaccggctacgtcacgctcctgtcggccgccggcggtccataagcccggccggccgggccgacgcgaataaaccgggccgccggccggggcgccgcgcagcagctcgccgcccggatccgccagacaaacaaggcccttgcacatgccggcccgggcgagcctgggggtccggtaattttgccatcccacccaagcggcttttggggtttttcctcttcccccctccccacatcccccctctttaggggttcgggtgggaacaaccgcgatgttttccggtggcggcggcccgctgtcccccggaggaaagtcggcggccagggcggcgtccgggttttttgcgcccgccggccctcgcggagccggccggggacccccgccttgtttgaggcaaaacttttacaacccctacctcgccccagtcgggacgcaacagaagccgaccgggccaacccagcgccatacgtactatagcgaatgcgatgaatttcgattcatcgccccgcgggtgctggacgaggatgcccccccggagaagcgcgccggggtgcacgacggtcacctcaagcgcgcccccaaggtgtactgcgggggggacgagcgcgacgtcctccgcgtcgggtcgggcggcttctggccgcggcgctcgcgcctgtggggcggcgtggaccacgccccggcggggttcaaccccaccgtcaccgtctttcacgtgtacgacatcctggagaacgtggagcacgcgtacggcatgcgcgcggcccagttccacgcgcggtttatggacgccatcacaccgacggggaccgtcatcacgctcctgggcctgactccggaaggccaccgggtggccgttcacgtttacggcacgcggcagtacttttacatgaacaaggaggaggttgacaggcacctacaatgccgcgccccacgagatctctgcgagcgcatggccgcggccctgcgcgagtccccgggcgcgtcgttccgcggcatctccgcggaccacttcgaggcggaggtggtggagcgcaccgacgtgtactactacgagacgcgccccgctctgttttaccgcgtctacgtccgaagcgggcgcgtgctgtcgtacctgtgcgacaacttctgcccggccatcaagaagtacgagggtggggtcgacgccaccacccggttcatcctggacaaccccgggttcgtcaccttcggctggtaccgtctcaaaccgggccggaacaacacgctagcccagccgcgggccccgatggccttcgggacatccagcgacgtcgagtttaactgtacggcggacaacctggccatcgaggggggcatgagcgacctaccggcatacaagctcatgtgcttcgatatcgaatgcaaggcggggggggaggacgagctggcctttccggtggccgggcacccggaggacctggttattcagatatcctgtctgctctacgacctgtccaccaccgccctggagcacgtcctcctgttttcgctcggttcctgcgacctccccgaatcccacctgaacgagctggcggccaggggcctgcccacgcccgtggttctggaattcgacagcgaattcgagatgctgttggccttcatgacccttgtgaaacagtacggccccgagttcgtgaccgggtacaacatcatcaacttcgactggcccttcttgctggccaagctgacggacatttacaaggtccccctggacgggtacggccgcatgaacggccggggcgtgtttcgcgtgtgggacataggccagagccacttccagaagcgcagcaagataaaggtgaacggcatggtgaacatcgacatgtacgggatcataaccgacaagatcaagctctcgagctacaagctcaacgccgtggccgaagccgtcctgaaggacaagaagaaggacctgagctatcgcgacatccccgcctactacgccaccgggcccgcgcaacgcggggtgatcggcgagtactgcatacaggattccctgctggtgggccagctgttttttaagtttttgccccatctggagctctcggccgtcgcgcgcttggcgggtattaacatcacccgcaccatctacgacggccagcagatccgcgtctttacgtgcctgctgcgcctggccgaccagaagggctttattctgccggacacccaggggcgatttaggggcgccgggggggaggcgcccaagcgtccggccgcagcccgggaggacgaggagcggccagaggaggagggggaggacgaggacgaacgcgaggagggcgggggcgagcgggagccggagggcgcgcgggagaccgccggccggcacgtggggtaccagggggccagggtccttgaccccacttccgggtttcacgtgaaccccgtggtggtgttcgactttgccagcctgtaccccagcatcatccaggcccacaacctgtgcttcagcacgctctccctgagggccgacgcagtggcgcacctggaggcgggcaaggactacctggagatcgaggtgggggggcgacggctgttcttcgtcaaggctcacgtgcgagagagcctcctcagcatcctcctgcgggactggctcgccatgcgaaagcagatccgctcgcggattccccagagcagccccgaggaggccgtgctcctggacaagcagcaggccgccatcaaggtcgtgtgtaactcggtgtacgggttcacgggagtgcagcacggactcctgccgtgcctgcacgttgccgcgacggtgacgaccatcggccgcgagatgctgctcgcgacccgcgagtacgtccacgcgcgctgggcggccttcgaacagctcctggccgatttcccggaggcggccgacatgcgcgcccccgggccctattccatgcgcatcatctacggggacacggactccatatttgtgctgtgccgcggcctcacggccgccgggctgacggccatgggcgacaagatggcgagccacatctcgcgcgcgctgtttctgccccccatcaaactcgagtgcgaaaagacgttcaccaagctgctgctgatcgccaagaaaaagtacatcggcgtcatctacgggggtaagatgctcatcaagggcgtggatctggtgcgcaaaaacaactgcgcgtttatcaaccgcacctccagggccctggtcgacctgctgttttacgacgataccgtatccggagcggccgccgcgttagccgagcgccccgcagaggagtggctggcgcgacccctgcccgagggactgcaggcgttcggggccgtcctcgtagacgcccatcggcgcatcaccgacccggagagggacatccaggactttgtcctcaccgccgaactgagcagacacccgcgcgcgtacaccaacaagcgcctggcccacctgacggtgtattacaagctcatggcccgccgcgcgcaggtcccgtccatcaaggaccggatcccgtacgtgatcgtggcccagacccgcgaggtagaggagacggtcgcgcggctggccgccctccgcgagctagacgccgccgccccaggggacgagcccgccccccccgcggccctgccctccccggccaagcgcccccgggagacgccgtcgcatgccgaccccccgggaggcgcgtccaagccccgcaagctgctggtgtccgagctggccgaggatcccgcatacgccattgcccacggcgtcgccctgaacacggactattacttctcccacctgttgggggcggcgtgcgtgacattcaaggccctgtttgggaataacgccaagatcaccgagagtctgttaaaaaggtttattcccgaagtgtggcaccccccggacgacgtggccgcgcggctccgggccgcagggttcggggcggtgggtgccggcgctacggcggaggaaactcgtcgaatgttgcatagagcctttgatactctagcatgagccccccgtcgaagctgatgtccctcattttacaataaatgtctgcggccgacacggtcggaatctccgcgtccgtgggtttctctgcgttgcgccggaccacgagcacaaacgtgctctgccacacgtgggcgacgaaccggtaccccgggcacgcggtgagcatccggtctatgagccggtagtgcaggtgggcggacgtgccgggaaagatgacgtacagcatgtggcccccgtaagtggggtccgggtaaaacaacagccgcgggtcgcacgccccgcctccgcgcaggatcgtgtggacgaaaaaaagctcgggttggccaagaatcccggccaagaggtcctggaggggggcgttgtggcggtcggccaacacgaccaaggaggccaggaaggcgcgatgctcgaatatcgtgttgatctgctgcacgaaggccaggattagggcctcgcggctggtggcggcgaaccgcccgtctcccgcgttgcacgcgggacagcaacccccgatgcctaggtagtagcccatcccggagagggtcaggcagttgtcggccacggtctggtccagacagaagggcagcgacacgggagtggtcttcaccaggggcaccgagaacgagcgcacgatggcgatctcctcggagggcgtctgggcgagggcggcgaaaaggccccgatagcgctggcgctcgtgtaaacacagctcctgtttgcgggcgtgaggcggcaggctcttccgggaggcccgacgcaccacgcccagagtcccgccggccgcagaggagcacgaccgccggcgctccttgccgtgatagggcccgggccgggagccgcggcgatgggggtcggtatcatacataggtacacagggtgtgctccagggacaggagcgagatcgagtggcgtctaagcagcgcgcccgcctcacggacaaatgtggcgagcgcggtgggctttggtacaaatacctgatacgtcttgaaggtgtagatgagggcacgcaacgctatgcagacacgcccctcgaactcgttcccgcaggccagcttggccttgtggagcagcagctcgtcgggatgggtggcggggggatggccgaacagaacccaggggtcaacctccatctccgtgatggcgcacatggggtcacagaacatgtgcttaaagatggcctcgggccccgcggcccgcagcaggctcacaaaccggcccccgtccccgggctgcgtctcggggtccgcctcgagctggtcgacgacgggtacgatacagtcgaagaggctcgtgttgttttccgagtagcggaccacggaggcccggagtctgcgcagggccagccagtaagcccgcaccagtaacaggttacacagcaggcattctccgccggtgcgcccgcgcccccggccgtgtttcagcacggtggccatcagagggcccaggtcgaggtcgggctgggcatcgggttcggtaaactgcgcaaagcgcggagccacgtcgcgcgtgcgtgccccgcgatgcgcttcccaggactggcggaccgtggcgcgacgggcctccgcggcagcgcgcagctggggccccgactcccagacggcgggggtgccggcgaggagcagcaggaccagatccgcgtacgcccacgtatccggcgactcctccggctcgcggtccccggcgaccgtctcgaattccccgttgcgagcggcggcgcgcgtacagcagctgtccccgcccccgcgccgaccctccgtgcagtccaggagacgggcgcaatccttccagttcatcagcgcggtggtgagcgacggctgcgtgccggatcccgccgccgaccccgccccctcctcgcccccggaggccaaggttccgatgagggcccgggtggcagactgcgccaggaacgagtagttggagtactgcaccttggcggctcccggggagggcgagggcttgggttgcttctgggcatgccgcccgggcaccccgccgtcggtacggaagcagcagtggagaaaaaagtgccggtggatgtcgtttatggtgagggcaaagcgtgcgaaggagccgaccagggtcgccttcttggtgcgcagaaagtggcggtccatgacgtacacaaactcgaacgcggccacgaagatgctagcggcgcagtggggcgcccccaggcatttggcacagagaaacgcgtaatcggccacccactggggcgagaggcggtaggtttgcttgtacagctcgatggtgcggcagaccagacagggccggtccagcgcgaaggtgtcgatggccgccgcggaaaagggcccggtgtccaaaagcccctccccacagggatccgggggcgggttgcggggtcctccgcgcccgcccgaaccccctccgtcgcccgcccccccgcgggcccttgagggggcggtgaccacgtcggcggcgacgtcctcgtcgagcgtaccgacgggcggcacacctatcacgtgactggccgccaggagctcggcgcagagagcctcgttaagagccaggaggctgggatcgaaggccacatacgcgcgctcgaacgcccccgccttccagctgctgccgggggactcttcgcacaccgcgacgctcgccaggaccccggggggcgaagttgccatggctgggcgggaggggcgcacgcgccagcgaactttacgggacacaatccccgactgcgcgctgcggtcccagaccctggagagtctagacgcgcgctacgtctcgcgagacggcgcgcatgacgcggccgtctggttcgaggatatgacccccgccgagctggaggttgtcttcccgactacggacgccaagctgaactacctgtcgcggacgcagcggctggcctccctcctgacgtacgccgggcctataaaagcgcccgacgacgccgccgccccgcagaccccggacaccgcgtgtgtgcacggcgagctgctcgcccgcaagcgggaaagattcgcggcggtcattaaccggttcctggacctgcaccagattctgcggggctgacgcgcgcgctgttgggcgggacggttcgcgaaccctttggtgggtttacgcgggcacgcacgctcccatcgcgggcgccatggcgggactgggcaagccctaccccggccacccaggtgacgccttcgagggtctcgttcagcgaattcggcttatcgtcccatctacgttgcggggcggggacggggaggcgggcccctactctccctccagcctcccctccaggtgcgcctttcagtttcatggccatgacgggtccgacgagtcgtttcccatcgagtatgtactgcggcttatgaacgactgggccgaggtcccgtgcaacccttacctgcgcatacagaacaccggcgtgtcggtgctgtttcaggggttttttcatcgcccacacaacgcccccgggggcgcgattacgccagagcggaccaatgtgatcctgggctccaccgagacgacggggctgtccctcggcgacctggacaccatcaaggggcggctcggcctggatgcccggccgatgatggccagcatgtggatcagctgctttgtgcgcatgccccgcgtgcagctcgcgtttcggttcatgggccccgaagatgccggacggacgagacggatcctgtgccgcgccgccgagcaggctattacccgtcgccgccgaacccggcggtcccgggaggcgtacggggccgaggccgggctgggggtggctggaacgggtttccgggccaggggggacggttttggcccgctccccttgttaacccaagggccctcccgcccgtggcaccaggccctgcggggtcttaagcacctacggattggcccccccgcgctcgttttggcggcgggactcgtcctgggggccgctatttggtgggtggttggtgctggcgcgcgcctataaaaaaggacgcaccgccgccctaatcgccagtgcgttccggacgccttcgccccacacagccctcccgtccgacacccccatatcgcttcccgacctccggtcccgatggccgtcccgcaatttcaccgccccagcaccgttaccaccgatagcgtccgggcgcttggcatgcgcgggctcgtcttggccaccaataactctcagtttatcatggataacaaccacccgcacccccagggcacccaaggggccgtgcgggagtttctccgcggtcaggcggcggcgctgacggaccttggtctggcccacgcaaacaacacgtttaccccgcagcctatgttcgcgggcgacgccccggccgcctggttgcggcccgcgtttggcctgcggcgcacctattcaccgtttgtcgttcgagaaccttcgacgcccgggaccccgtgaggcccggggagttccttctggggtgttttaatcaataaaagaccacaccaacgcacgagccttgcgtttaatgtcgtgtttattcaagggagtgggatagggttcgacggttcgaaacttaacacacaaaataatcgagcgcgtctagcccagtaacatgcgcacgtgatgtaggctggtcagcacggcgtcgctgtgatgaagcagcgcccggcgggtccgctgtaactgctgttgtaggcggtaacaggcgcggatcagcaccgccagggcgctacgaccggtgcgttgcacgtagcgtcgcgacagaactgcgtttgccgatacgggcggggggccgaattgtaagcgcgtcacctcttgggagtcatcggcggataacgcactgaatggttcgttggttatgggggagtgtggttcccgagggagtgggtcgagcgcctcggcctcggaatccgagaggaacaacgaggtggtgtcggagtcttcgtcgtcagagacatacagggtctgaagcagcgacacgggcgggggggtagcgtcaatgtgtagcgcgagggaggatgcccacgaagacaccccagacaaggagctgcccgtgcgtggatttgtggacgacgcggaagccgggacggatgggcggttttgcggtgcccggaaccgaaccgccggatactccccgggtgctacatgcccgttttggggctggggttggggctggggctggggctggggttggggctggggttggggttggggctggggttggggctggggctggggttggggctggggttggggctggggttggggctgggggttgggggttggggctgggggttggggttggggctgggggctggggctggggttggggctggggttgggggttgggggctggggttgggggttgggggctggggctggggctggggttggggctggggttggggctggggttggggctggggttgggggctgggggctggggttggggttagttggggttggggttggggctgggggttggggttggggggtggggttggggttggggctgggggttgggggctggggttggggctggggttggggctggggttggggctggggttggggctggggttggggctggggttggggctggggttggggctggggttggggctggggttggggctggggttggggctggggttggggctggggcgcggacaggcggttgacggtcaaatgcccccgggggcgcgcagatgtggtgggcgtggccaccggctgccgtgtagtggggcggcgggaaaccgggcctccgggcgtaacaccgccctccagcgtcaagtatgtggggggcgggcctgacgtcgggggcggggtgacgggttggaccgcgggaggcgggggagagggacctgcgggagaggatgaggtcggctcggccgggttgcggcctaaaacaggggccgtggggtcggcggggtcccagggtgaagggagggattcccgcgattcggacagcgacgcgacagcggggcgcgtaaggcgccgctgcggcccgcctacgggaaccctggggggggttggcgcgggacccgaggttagcggggggcggcggttttcgcccccgggcaaaaccgtgccggttgcgaccgggggcggaacgggatcgatagggagagcgggagaagcctggccggcgaactggggaccgagcgggaggggcacaccagacaccaaagcgtggagcgctggctctgggggtttgggaggggccggggggcgcgcgaaatcggtaaccggggcgaccgtgtcggggagggcaggcggccgccaaccctgggtggtcgcggaagcctgggtggcgcgcgccagggagcgtgcccggcggtgtcggcgcgcgcgcgacccggacgaagaagcggcagaagcgcgggaggaggcgggggggcggggggcggtggcatcggggggcgccggggaactttggggggacggcaagcgccggaagtcgtcgcgggggcccacgggcgccggccgcgtgctttcggccgggacgcccggtcgtgcttcgcgagccgtgactgccggcccagggggccgcggtgcacactgggacgtggggacggactgatcggcggtgggcgaaagggggtccggggcaaggaggggcgcggggccgccggagtcgtcagacgcgagctcctccaggccgtgaatccatgcccacatgcgaggggggacgggctcgccgggggtggcgtcggtgaatagcgtgggggccaggcttccgggccccaacgagccctccgtcccaacaaggtccgccgggccgggggtcgggttcgggaccgaggggctctggtcgtcgggggcgcgctggtacaccggatgccccgggaatagctcccccgacaggagggaggcgtcgaacggccgcccgaggatagctcgcgcgaggaaggggtcctcgtcggtggcgctggcggcggggccggccacgccgcccgccacaaacgggagctcctcggtggcctcgctgccaacaaaccgcacggcgggggggccgggggggtccgggttttcccacaacaccgcgaccggggtcatggagatgtccacgagcaccagacacggcgggccccgggcgaggggccgctcggcgatgagcgcggacaggcgcgggagctgtgccgccagacacgcgttttcaatcgggttcaggtcggcgtgcaggaggcggacggcccacgtctcgatgtcggacgacacggcatcgcgcaaggcggcgtccggcccgcgagcgcgtgagtcaaacagcgtgagacacagctccagctccgactcgcgggaaaaggccgtggtgttgcggagcgccacgacgacgggcgcgcccaggagcactgccgccagcaccaggtccatggccgtaacgcgcgccgcgggggtgcggtgggtggcggcggccggcacggcgacgtgctggcccgtgggccggtagagggcgttggggggagcggggggtgacgcctcgcgcccccccgaggggctcagcgtctgcccagattccagacgcgcggtcagaagggcgtcgaaactgtcatactctgtgtagtcgtccggaaacatgcaggtccaaagagcggccagagcggtgcttgggagacacatgcgcccgaggacgctcaccgccgccagcgcctgggcgggactcagctttcccagcgcggcgccgcgctcggttcccagctcggggaccgagcgccagggcgccagggggtcggtttcggacaacttgccgcggcgccagtctgccagccgcgtgccgaacatgaggccccgggtcggagggcctccggtcgaaaacactggcagcacgcggatgcgggcgtctggatgcggggtcaggcgctgcacgaatagcatggaatctgctgcgttctgaaacgcacgggggagggtgagatgcatgtactcgtgttggcggaccagatccaggcgccaaaaggtgtaaatgtgttccggggagctggccaccagcgccaccagcacgtcgttctcgttaaaggaaacgcggtgcctagtggagctgtggggcccgagcggcggtcccggggccgccgcgtcacccccccattccagctgggcccagcgacacccaaactcgcgcgtgagagtggtcgcgacgagggcgacgtagagctcggccgccgcatccatcgaggccccccatctcgcctggcggtggcgcacaaagcgtccgaagagctgaaagttggcggcctgggcgtcgctgagggccagctgaagccggttgatgacggtgatgacgtacatggccgtgacggtcgaggccgactccagggtgtccgtcggaagcggggggcgaatgcatgccgcctcgggacacatcagcagcgcgccgagcttgtcggtcacggccgggaagcagagcgcgtactgcagtggcgttccatccgggaccaaaaagctgggggcgaacggccgatccagcgtactggtggcctcgcgcagcaccaggggccccgggcctccgctcactcgcaggtacgcctcgccccggcggcgcagcatctgcgggtcggcctcttggccgggtggggcggacgcccgggcgcgggcgtctagggcgcgaagatccacgagcaggggcgcgggggcggcgcccccccccgcgcccgtctggcctgtggccttggcgtacgcgctatataagcccatgcggcgttggatgagctcccgcgcgccccggaactcctccaccgcccatggggccaggtccccggccaccgcgtcgaattccgccaacaggccccccagggtgtcaaagttcatctcccaggccacccttggcaccacctcgtcccgcagccgggcgctcaggtcggcgtgttgggccacgcgccccccgagctcctccacggccccggcccgctcggcgctcttggcgcccaggacgccctggtacttggcgggaaggcgctcgtagtcccgctgggctcgcagccccgacacagtgttggtggtgtcctgcagggcgcgaagctgctcgcatgccgcgcgaaatccctcgggcgatttccaggcccccccgcgaacgcggccgaagcgaccccatacctcgtcccactccgcctcggcctcctcgagagacctccgcagggcctcgacgcggcgacgggtgtcgaagagcgcctgcaggcgcgcgccctgtcgcgtcaggaggcccgggccgtcgccgctggccgcgtttagcgggtgcgtctcaaaggtacgctgggcatgttccaaccaggcgaccgcctgcacgtcgagctcgcgcgccttctccgtctggtccaacagaatttcgacctgatccgcgatctcctccgccgagcgcgcctggtccagcgtcttggccacggtcgccgggacggcgaccaccttcagcagggtcttcagattggccagaccctcggcctcgagctgggcccggcgctcgcgcgcggccagcacctcccgcagccccgccgtgacccgctcggtggcttcggcgcgctgctgtttggcgcgcaccacggcgtccttggtatcggccaggtcctgtcgggtcacgaatgcgacgtagtcggcgtacgccgtgtccttcacggggctctggtccacgcgctccagcgccgccacgcacgccaccagcgcgtcctcgctcgggcagggcagggtgacccctgcccggacaagctcggcggccgccgccgggtcgttgcgcaccgcggatatctcctccgcggcggcggccaggtccagcgccacgcttccgatcgcgcgccgcgcgtcggcccggagggcgtccaggcgatcgcggatatccacgtactcggcgtagcccttttgaaaaaacggcacgtactggcgcagggccggcacgccccccaagtcttccgacaggtgtaggacggcctcgtggtagtcgataaacccgtcgttcgcctgggcccgctccagcagcccccccgccagccgcagaagccgcgccaggggctcggtgtccacccgaaacatgtcggcgtacgtgtcggccgcggccccgaaggccgcgctccagtcgatgcggtgaatggctgcgagcggggggagcatggggtggcgctggttctcgggggtgtatgggttaaacgcaagggccgtctccagggcaagggtcaccgccttggcgttggttcccagcgcctgttcggcccgctttcggaagtcccgggggttgtagccgtgcgtgcccgccagcgcctgcaggcgacggagctcgaccacgtcaaactcggcaccgctttccacgcggtccagcacggcctccacgtcggcggcccagcgctcgtggctactgcgggcgcgctgggccgccatcttctctctcaggtcggcgatggcggcctcaagttcgtcggcgcggcgtcgcgtggcgccgatgacctttcccagctcctgcagggcgcgcccgctgggggagtggtccccggccgtcccttcggcgtgcaacaggcccccgaacctgccctcgtggcccgcgaggctttcccgcgcgccggtggtcgcgcgcgtcgcggcctggatcagggaggcatgctctccctccggttggttggcggcccggcgcacctggacgacaaggtcggctgccgccgaccctaaggtcgtgagctgggcgatggccccccgcgcgtccagggccaaccgagtcgccttgacgtatcccgcggcgctgtcggccatggccgctaggaaggccaggggggaggccgggtcgctggcggccgcgcccagggccgtcaccgcgtcgaccaggacgcggtgcgcccgcacggccgcatccaccgtcgacgcggggtctgccgtcgcgacggcggcgctgccggcgttgatggcgttcgagacggcgtgggctatgatcggggcgtgatcggcgaagaactgcaagagaaacggagtctctggggcgtcggcgaacaggttcttcagcaccaccacgaagctgggatgcaagccagacagagccgtcgccgtgtccggagtcgggtgctccagggcatctcggtactgccccagcagcccccacatgtccgcccgcagcgccgccgtaacctcagggggcgccccccgaacggcctcggggaggtccgaccagcccgccggcagggaggcccgcagggtcgccaggacggccggacaggcctttagccccacaaagtcagggagggggcgcaggaccccctggagtttgtgcaagaacttctcccgggcgtcgcgggccaccttcgcccgctcccgcgctccctcgagcattgcctccagggagcgcgcgcgctcccgcaaacgggcacgcgcatcgggggcgagctctgccgtcagcttggcggcatccatggcccgcgcctgccgcagcgcttcctcggccatgcgcgtggcctctggcgacagcccgccgtcgtcggggtagggcgacgcgccgggcgcaggaacaaaggccgcgtcgctgtccagctgctggcccagggccgcatctagggcgtcgaagcgccgcagctcggccagacccgagctgcggcgcgcctgctggtcgttaatgtcgcggatgctgcgcgccagctcgtccagcggcttgcgttctatcagcccttggttggcggcgtccgtcaggacggagagccaggccgccaggtcctcgggggcgtccagcgtctggccccgctggatcagatcccgcaataggatggccgtggggctggtcgcgatcgggggcggggcgggaatggcggcgcgctgcgcgatgtcccgcgtgtgctggtcgaagacaggcagggactcgagcagctggaccacgggcacgacggcggccgaagccacgtgaaaccggcggtcgttgttgtcgctggcctgtagagccttggcgctgtatacggccccccggtaaaagtactccttaaccgcgccctcgatcgcccgacgggcctgggtccgcacctcctccagccgaacctgaacggcctcggggcccagggggggtgggcgcggagccccctgcggggccgccccggccggggcgggcattacgccgaggggcccggcgtgctgtgagaccgcgtcgaccccgcgagcgagggcgtcgagggcctcgcgcatctggcgatcctccgcctccaccctaatctcttcgccacgggcaaatttggccagagcctggactctatacagaagcggttctgggtgcgtcggggtggcgggggcaaaaagggtgtccgggtgggcctgcgagcgctccagaagccactcgccgaggcgtgtatacagattggccggcggggccgcgcgaagctgcagctccaggtccgcgagttccccgtaaaaggcgtccgtctcccgaatgacatccctagccacaaggatcagcttcgccagcgccaggcgaccgatcagagagttttcgtccagcacgtgctggacgaggggcagatgggcggccacgtcggccaggctcaggcgcgtggaggccagaaagtcccccacggccgttttccggggcagcatgctcagggtaaactccagcagggcggcggccgggccggccaccccggcctgggtgtgcgtccgggccccgttctcgatgagaaaggcgaggacgcgttcaaagaaaaaaataacacagagctccagcagccccggagaagccggatacggcgaccgtaaggcgctgatggtgagccgcgaacacgcggcgacctcgcgggccagggtggcggagcacgcggtgaacttaaccgccgtggcggccacgtttgggtgggcctcgaacagctgggcgaggtctgcgcccgggggctcgggtgagcggcgagtcttcagcgcctcgagggcctgtgaggacgccggaaccatgggcccgtcgtcctcgcccgcctcggcgaccggcggcccggccgggtcggggggtgccgaggcgaggacaggctccggaacggaggcggggaccgcggccccgacgggggttttgcctttgggggtggatttcttcttggttttggcagggggggccgagcgtttcgttttctcccccgaagtcaggtcttcgacgctggaaggcggagtccaggtgggtcggcggcgcttgggaaggccggccgagtagcgtgcccggtgccgaccaaccgggacgacgcccatctccaggacccgcatgtcgtcgtcatcttcttcggccgcctctgcggcgggggtcttgggggcggagggaggcggtggtgggatcgcggagggtgggtcggcggaggggggatccgtgggtggggtaccctttagggccaccgcccatacatcgtcgggcgcccgattcgggcgcttggcctctggttttgccgacggaccggccgtcccccgggatgtctcggaggccctgtcgtcgcgacgggcccgggtcggtggcggcgactgggcggctgtgggcgggtgtggccccggcccccctcccccctcccgggggcccacgccgacgcagggctcccccaggcccgcgatctcgccccgcagggggtgcgtgatggccacgcgccgttcgctgaacgcttcgtcctgcatgtaagtctcgctggccccgtaaagatgcagagccgcggccgtcaagtccgcaggagccgcgggttccgggcccgacggcacgaaaaacaccatggctcccgcccaccgtacgtccgggcgatcgcgggtgtaatacgtcaggtatggatacatgtcccccgcccgcactttggcgatgaacgcgggggtgccctccggaaggccatgcgggtcaaaaaggtatgcggtgtcgccgtccctgaacagccccatccctagggggccaatggttaggagcgtgtacgacagggggcgcagggcccacgggccggcgaagaacgtgtgtgcggggcattgtgtctccagcaggcctgccgcgggctccccgaagaagcccacctcgccgtatacgcgcgagaagacacagcgcagtccgccgcgcgcccctgggtactcgaggaagttggggagctcgacgatcgaacacatgcgcggcggcccagggcccgcagtcgcgcgcgtccactcgcccccctcgaccaaacatccctcgatggcctccgcggacagaacgtcgcgagggcccacatcaaatatgaggctgagaaaggacagcgacgagcgcatgcacgataccgacccccccggctccaggtcgggcgcgaactggttccgagcaccggtgaccacgatgtcgcgatcccccccgcgttccatcgtggagtgcggtggggtgcccgcgatcatatgtgccctgcgggccagagacccggcctgtttatggaccggacccccggggttagtgttgtttccgccacccacgcccccgtaccatggccccggttcccctgattaggctacgagtcgcggtgatcgcttcccaaaaaccgagctgcgtttgtctgtcttggtcttccccccccccagcccgcacaccataacaccgagaacaacacacgggggtgggcggaacataataaagctttattggtaactagttaacggcaagtccgtgggtggcgcgacggtgtcctccgggatcatctcgtcgtcctcgacgggggtgttggaatgaggcgcctcctcgcggtccacctggcgtgggccgtgcccataggcctccggcttctgtgcgtccatgggcgtaggcgcggggagactgtttccggcgtcgcggacctccaggtccctgggagcctccggtccggctaacggacgaaacgcggaagcgcgaaacacgccgtcggtgacccgcaggagctcgttcatcagtaaccaatccatactcagcgtaacggccaacccctggcgagacagatccacggagtccggaaccgcggtcgtctggcccagggggccgaggctgtagtccccccaggcccctaggtcgcgacggctcgtaagcacgacgcggtcggccgcggggctttgcgggggggcgtcctcgggcgcatgcgccattacctctcggatggccgcggcgcgctggtcggccgagctgaccaagggcgccacgaccacggcgcgctccgtctgcaggcccttccacgtgtcgtggagttcctggacaaactcggccacgggctcgggtcccgcggccgcgcgcgcggcttgatagcaggccgacagacgccgccagcgcgctagaaactgacccatgaaacaaaacccggggacctggtctcccgacagcagcttcgacgcccgggcgtgaatgccggacacgacggacagaaacccgtgaatttcgcgccggaccacggccagcacgttgtcctcgtgcgacacctgggccgccagctcgtcgcacacccccaggtgcgccgtggtttcggtgatgacggaacgcaggctcgcgagggacgcgaccagcgcgcgcttggcgtcgtgatacatgctgcagtactgactcaccgcgtcccccatggcctcggggggccagggccccaggcggtcgggcgtgtccccgaccaccgcatacaggcggcgcccgtcgctctcgaaccgacactcgaaaaaggcggagagcgtgcgcatgtgcagccgcagcagcacgatggcgtcctccagttggcgaatcagggggtcggcgcgctcggcgaggtcctgcagcaccccccgggcagccagggcgtacatgctaatcaacaggaggctggtgcccacctcggggggcggggggggctgcagttggaccaggggccgcagctgctcgacggcacccctggagatcacgtacagctcccggagcagctgctctatgttgtcggccatctgcatagtggggccgaggccgccccgggcggccggttcgaggagagtgatcagcgcgcccagtttggtgcgatggccctcgaccgtggggagatagcccagcccaaagtcccgggcccaggccaacacacgcagggcgaactcgaccgggcggggaaggtaggccgcgctacacgtggccctcagcgcgtccccaaccaccagggccagaacgtaggggacgaagcccgggtcggcgaggacgttggggtgaatgccctcgagggcggggaagcggatctgggtcgccgcggccaggtggacagagggggcatggctgggctgcccgacggggagaagcgcggacagcggcgtggccggggtggtgggggtgatgtcccagtgggtctgaccatacacgtcgatccagatgagcgccgtctcgcggagaaggctgggttgaccggaactaaagcggcgctcggccgtctcaaactcccccacgagcgcccgccgcaggctcgccagatgttccgtcggcacggccggccccatgatacgcgccagcgtctggctcagaacgccccccgacaggccgaccgcctcacagagccgcccgtgcgtgtgctcgctggcgccctggacccgcctgaaagtttttacgtagttggcatagtacccgtattcccgcgccagaccaaacacgttcgaccccgcgagggcaatgcacccaaagagctgctggacttcgccgagtccgtggccggcgggcggccgcgcggggacgcccgccgccagaaacccctccagggccgaaaggtagtgcgtgcagtgcgagggcgtgaacccagcgtcgatcagggtgttgatcaccacggagggcgaattggtattctggatcaacgtccacgtctgctgcagcagagccagcagccgctgctgggcgccggcggagggctgctccccgagctgcagcaggctggagacggcaggctggaagactgccagtgccgacgaactcaggaacggcacgtcgggatcaaacacggccacgtccgtccgcacgcgcgccattagcgtccccgggggcgcacaggccgagcgcgggctgacgcggctgagggccgtcgacacgcgcacctcctcgcggctgcgaaccatcttgttggcctccagtggcggaatcattatggccgggtcgatctcccgcacggtgtgctgaaactgcgccaacaggggcggcgggaccacagccccccgctcgggggtcgtcaggtactcgtccaccagggccaacgtaaagagggcccgtgtgaggggagtgagggtcgcgtcgtctatgcgctggaggtgcgccgagaacagcgtcacccgattactcaccagggccaagaaccggaggccctcttgcacgaacggggcggggaagagcaggctgtacgccggggtggtaaggttcgcgctgggctgccccaacgggaccggcgccagcttgagcgacgtctccccaagggcctcgatggaggtccgcgggctcatggccaagcagctcttggtgacggtttgccagcggtctatccactccacggcgcactggcggacgcggaccggccccagggccgccgcggtgcgcaggccggcggactccagcgcatgggacgtgtcggagccggtgaccgcgaggatggtgtccttgatgacctccatctcccggaaggcctggtcgggggcctcggggagagccaccaccaagcggtgtacgagcaacccggggaggttctcggccaagagcgccgtctccggaagcccgtgggcccggtggagcgcgcacaggtgttccagcagcggccgccagcatgcccgcgcgtctgccggggcgatggccgttcccgacaacagaaacgccgccatggcggcgcgcagcttggccgtggccagaaacgccgggtcgtccgccccgtttgccgtctcggccgtgggggttggcggttggcgaaggccggctaggctcgccaataggcgctgcataggtccgtccgagggcggaccggcgggtgaggtcgtgacgacgggggcctcggacgggagaccgcggtctgccatgacgcccggctcgcgtgggtgggggacagcgtagaccaacgacgagaccgggcgggaatgactgtcgtgcgctgtagggagcggcgaattatcgatcccccgcggccctccaggaaccccgcaggcgttgcgagtaccccgcgtcttcgcggggtgttatacggccacttaatgaattcataacttcgtatagcatacattatacgaagttattaattaatcgaccaattctcatgtttgacagcttatcatcgaatttctgccattcatccgcttattatcacttattcaggcgtagcaaccaggcgtttaagggcaccaataactgccttaaaaaaattacgccccgccctgccactcatcgcagtactgttgtaattcattaagcattctgccgacatggaagccatcacaaacggcatgatgaacctgaatcgccagcggcatcagcaccttgtcgccttgcgtataatatttgcccatggtgaaaacgggggcgaagaagttgtccatattggccacgtttaaatcaaaactggtgaaactcacccagggattggctgagacgaaaaacatattctcaataaaccctttagggaaataggccaggttttcaccgtaacacgccacatcttgcgaatatatgtgtagaaactgccggaaatcgtcgtggtattcactccagagcgatgaaaacgtttcagtttgctcatggaaaacggtgtaacaagggtgaacactatcccatatcaccagctcaccgtctttcattgccatacgaaattccggatgagcattcatcaggcgggcaagaatgtgaataaaggccggataaaacttgtgcttatttttctttacggtctttaaaaaggccgtaatatccagctgaacggtctggttataggtacattgagcaactgactgaaatgcctcaaaatgttctttacgatgccattgggatatatcaacggtggtatatccagtgatttttttctccattttagcttccttagctcctgaaaatctcgataactcaaaaaatacgcccggtagtgatcttatttcattatggtgaaagttggaacctcttacgtgccgatcaacgtctcattttcgccaaaagttggcccagggcttcccggtatcaacagggacaccaggatttatttattctgcgaagtgatcttccgtcacaggtatttattcgcgataagctcatggagcggcgtaaccgtcgcacaggaaggacagagaaagcgcggatctgggaagtgacggacagaacggtcaggacctggattggggaggcggttgccgccgctgctgctgacggtgtgacgttctctgttccggtcacaccacatacgttccgccattcctatgcgatgcacatgctgtatgccggtataccgctgaaagttctgcaaagcctgatgggacataagtccatcagttcaacggaagtctacacgaaggtttttgcgctggatgtggctgcccggcaccgggtgcagtttgcgatgccggagtctgatgcggttgcgatgctgaaacaattatcctgagaataaatgccttggcctttatatggaaatgtggaactgagtggatatgctgtttttgtctgttaaacagagaagctggctgttatccactgagaagcgaacgaaacagtcgggaaaatctcccattatcgtagagatccgcattattaatctcaggagcctgtgtagcgtttataggaagtagtgttctgtcatgatgcctgcaagcggtaacgaaaacgatttgaatatgccttcaggaacaatagaaatcttcgtgcggtgttacgttgaagtggagcggattatgtcagcaatggacagaacaacctaatgaacacagaaccatgatgtggtctgtccttttacagccagtagtgctcgccgcagtcgagcgacagggcgaagccctcgagctggttgccctcgccgctgggctggcggccgtctatggccctgcaaacgcgccagaaacgccgtcgaagccgtgtgcgagacaccgcggccggccgccggcgttgtggatacctcgcggaaaacttggccctcactgacagatgaggggcggacgttgacacttgaggggccgactcacccggcgcggcgttgacagatgaggggcaggctcgatttcggccggcgacgtggagctggccagcctcgcaaatcggcgaaaacgcctgattttacgcgagtttcccacagatgatgtggacaagcctggggataagtgccctgcggtattgacacttgaggggcgcgactactgacagatgaggggcgcgatccttgacacttgaggggcagagtgctgacagatgaggggcgcacctattgacatttgaggggctgtccacaggcagaaaatccagcatttgcaagggtttccgcccgtttttcggccaccgctaacctgtcttttaacctgcttttaaaccaatatttataaaccttgtttttaaccagggctgcgccctgtgcgcgtgaccgcgcacgccgaaggggggtgcccccccttctcgaaccctcccggtcgagtgagcgaggaagcaccagggaacagcacttatatattctgcttacacacgatgcctgaaaaaacttcccttggggttatccacttatccacggggatatttttataattattttttttatagtttttagatcttcttttttagagcgccttgtaggcctttatccatgctggttctagagaaggtgttgtgacaaattgccctttcagtgtgacaaatcaccctcaaatgacagtcctgtctgtgacaaattgcccttaaccctgtgacaaattgccctcagaagaagctgttttttcacaaagttatccctgcttattgactcttttttatttagtgtgacaatctaaaaacttgtcacacttcacatggatctgtcatggcggaaacagcggttatcaatcacaagaaacgtaaaaatagcccgcgaatcgtccagtcaaacgacctcactgaggcggcatatagtctctcccgggatcaaaaacgtatgctgtatctgttcgttgaccagatcagaaaatctgatggcaccctacaggaacatgacggtatctgcgagatccatgttgctaaatatgctgaaatattcggattgacctctgcggaagccagtaaggatatacggcaggcattgaagagtttcgcggggaaggaagtggttttttatcgccctgaagaggatgccggcgatgaaaaaggctatgaatcttttccttggtttatcaaacgtgcgcacagtccatccagagggctttacagtgtacatatcaacccatatctcattcccttctttatcgggttacagaaccggtttacgcagtttcggcttagtgaaacaaaagaaatcaccaatccgtatgccatgcgtttatacgaatccctgtgtcagtatcgtaagccggatggctcaggcatcgtctctctgaaaatcgactggatcatagagcgttaccagctgcctcaaagttaccagcgtatgcctgacttccgccgccgcttcctgcaggtctgtgttaatgagatcaacagcagaactccaatgcgcctctcatacattgagaaaaagaaaggccgccagacgactcatatcgtattttccttccgcgatatcacttccatgacgacaggatagtctgagggttatctgtcacagatttgagggtggttcgtcacatttgttctgacctactgagggtaatttgtcacagttttgctgtttccttcagcctgcatggattttctcatactttttgaactgtaatttttaaggaagccaaatttgagggcagtttgtcacagttgatttccttctctttcccttcgtcatgtgacctgatatcgggggttagttcgtcatcattgatgagggttgattatcacagtttattactctgaattggctatccgcgtgtgtacctctacctggagtttttcccacggtggatatttcttcttgcgctgagcgtaagagctatctgacagaacagttcttctttgcttcctcgccagttcgctcgctatgctcggttacacggctgcggcgagcgctagtgataataagtgactgaggtatgtgctcttcttatctccttttgtagtgttgctcttattttaaacaactttgcggttttttgatgactttgcgattttgttgttgctttgcagtaaattgcaagatttaataaaaaaacgcaaagcaatgattaaaggatgttcagaatgaaactcatggaaacacttaaccagtgcataaacgctggtcatgaaatgacgaaggctatcgccattgcacagtttaatgatgacagcccggaagcgaggaaaataacccggcgctggagaataggtgaagcagcggatttagttggggtttcttctcaggctatcagagatgccgagaaagcagggcgactaccgcacccggatatggaaattcgaggacgggttgagcaacgtgttggttatacaattgaacaaattaatcatatgcgtgatgtgtttggtacgcgattgcgacgtgctgaagacgtatttccaccggtgatcggggttgctgcccataaaggtggcgtttacaaaacctcagtttctgttcatcttgctcaggatctggctctgaaggggctacgtgttttgctcgtggaaggtaacgacccccagggaacagcctcaatgtatcacggatgggtaccagatcttcatattcatgcagaagacactctcctgcctttctatcttggggaaaaggacgatgtcacttatgcaataaagcccacttgctggccggggcttgacattattccttcctgtctggctctgcaccgtattgaaactgagttaatgggcaaatttgatgaaggtaaactgcccaccgatccacacctgatgctccgactggccattgaaactgttgctcatgactatgatgtcatagttattgacagcgcgcctaacctgggtatcggcacgattaatgtcgtatgtgctgctgatgtgctgattgttcccacgcctgctgagttgtttgactacacctccgcactgcagtttttcgatatgcttcgtgatctgctcaagaacgttgatcttaaagggttcgagcctgatgtacgtattttgcttaccaaatacagcaatagcaatggctctcagtccccgtggatggaggagcaaattcgggatgcctggggaagcatggttctaaaaaatgttgtacgtgaaacggatgaagttggtaaaggtcagatccggatgagaactgtttttgaacaggccattgatcaacgctcttcaactggtgcctggagaaatgctctttctatttgggaacctgtctgcaatgaaattttcgatcgtctgattaaaccacgctgggagattagataatgaagcgtgcgcctgttattccaaaacatacgctcaatactcaaccggttgaagatacttcgttatcgacaccagctgccccgatggtggattcgttaattgcgcgcgtaggagtaatggctcgcggtaatgccattactttgcctgtatgtggtcgggatgtgaagtttactcttgaagtgctccggggtgatagtgttgagaagacctctcgggtatggtcaggtaatgaacgtgaccaggagctgcttactgaggacgcactggatgatctcatcccttcttttctactgactggtcaacagacaccggcgttcggtcgaagagtatctggtgtcatagaaattgccgatgggagtcgccgtcgtaaagctgctgcacttaccgaaagtgattatcgtgttctggttggcgagctggatgatgagcagatggctgcattatccagattgggtaacgattatcgcccaacaagtgcttatgaacgtggtcagcgttatgcaagccgattgcagaatgaatttgctggaaatatttctgcgctggctgatgcggaaaatatttcacgtaagattattacccgctgtatcaacaccgccaaattgcctaaatcagttgttgctcttttttctcaccccggtgaactatctgcccggtcaggtgatgcacttcaaaaagcctttacagataaagaggaattacttaagcagcaggcatctaaccttcatgagcagaaaaaagctggggtgatatttgaagctgaagaagttatcactcttttaacttctgtgcttaaaacgtcatctgcatcaagaactagtttaagctcacgacatcagtttgctcctggagcgacagtattgtataagggcgataaaatggtgcttaacctggacaggtctcgtgttccaactgagtgtatagagaaaattgaggccattcttaaggaacttgaaaagccagcaccctgatgcgacctcgttttagtctacgtttatctgtctttacttaatgtcctttgttacaggccagaaagcataactggcctgaatattctctctgggcccactgttccacttgtatcgtcggtctgataatcagactgggaccacggtcccactcgtatcgtcggtctgattattagtctgggaccacggtcccactcgtatcgtcggtctgattattagtctgggaccacggtcccactcgtatcgtcggtctgataatcagactgggaccacggtcccactcgtatcgtcggtctgattattagtctgggaccatggtcccactcgtatcgtcggtctgattattagtctgggaccacggtcccactcgtatcgtcggtctgattattagtctggaaccacggtcccactcgtatcgtcggtctgattattagtctgggaccacggtcccactcgtatcgtcggtctgattatcggtctgggaccacggtcccacttgtattgtcgatcagactatcagcgtgagactacgattccatcaatgcctgtcaagggcaagtattgacatggttgggcaattcggcgcagcaccatggcctgaaataacctctgaaagaggaacttggttaggtaccttctgaggcggaaagaaccagctgtggaatgtgtgtcagttagggtgtggaaagtccccaggctccccagcaggcagaagtatgcaaagcatgcatctcaattagtcagcaaccaggtgtggaaagtccccaggctccccagcaggcagaagtatgcaaagcatgcatctcaattagtcagcaaccatagtcccgcccctaactccgcccatcccgcccctaactccgcccagttccgcccattctccgccccatggctgactaattttttttatttatgcagaggccgaggccgcctcggcctctgagctattccagaagtagtgaggaggcttttttggaggcctaggcttttgcaaaaagcttgggatctctataatctcgcgcaacctattttcccctcgaacactttttaagccgtagataaacaggctgggacacttcacatgagcgaaaaatacatcgtcacctgggacatgttgcagatccatgcacgtaaactcgcaagccgactgatgccttctgaacaatggaaaggcattattgccgtaagccgtggcggtctggtaccggtgggtgaagaccagaaacagcacctcgaactgagccgcgatattgcccagcgtttcaacgcgctgtatggcgagatcgatcccgtcgttttacaacgtcgtgactgggaaaaccctggcgttacccaacttaatcgccttgcagcacatccccctttcgccagctggcgtaatagcgaagaggcccgcaccgatcgcccttcccaacagttgcgcagcctgaatggcgaatggcgctttgcctggtttccggcaccagaagcggtgccggaaagctggctggagtgcgatcttcctgaggccgatactgtcgtcgtcccctcaaactggcagatgcacggttacgatgcgcccatctacaccaacgtgacctatcccattacggtcaatccgccgtttgttcccacggagaatccgacgggttgttactcgctcacatttaatgttgatgaaagctggctacaggaaggccagacgcgaattatttttgatggcgttaactcggcgtttcatctgtggtgcaacgggcgctgggtcggttacggccaggacagtcgtttgccgtctgaatttgacctgagcgcatttttacgcgccggagaaaaccgcctcgcggtgatggtgctgcgctggagtgacggcagttatctggaagatcaggatatgtggcggatgagcggcattttccgtgacgtctcgttgctgcataaaccgactacacaaatcagcgatttccatgttgccactcgctttaatgatgatttcagccgcgctgtactggaggctgaagttcagatgtgcggcgagttgcgtgactacctacgggtaacagtttctttatggcagggtgaaacgcaggtcgccagcggcaccgcgcctttcggcggtgaaattatcgatgagcgtggtggttatgccgatcgcgtcacactacgtctgaacgtcgaaaacccgaaactgtggagcgccgaaatcccgaatctctatcgtgcggtggttgaactgcacaccgccgacggcacgctgattgaagcagaagcctgcgatgtcggtttccgcgaggtgcggattgaaaatggtctgctgctgctgaacggcaagccgttgctgattcgaggcgttaaccgtcacgagcatcatcctctgcatggtcaggtcatggatgagcagacgatggtgcaggatatcctgctgatgaagcagaacaactttaacgccgtgcgctgttcgcattatccgaaccatccgctgtggtacacgctgtgcgaccgctacggcctgtatgtggtggatgaagccaatattgaaacccacggcatggtgccaatgaatcgtctgaccgatgatccgcgctggctaccggcgatgagcgaacgcgtaacgcgaatggtgcagcgcgatcgtaatcacccgagtgtgatcatctggtcgctggggaatgaatcaggccacggcgctaatcacgacgcgctgtatcgctggatcaaatctgtcgatccttcccgcccggtgcagtatgaaggcggcggagccgacaccacggccaccgatattatttgcccgatgtacgcgcgcgtggatgaagaccagcccttcccggctgtgccgaaatggtccatcaaaaaatggctttcgctacctggagagacgcgcccgctgatcctttgcgaatacgcccacgcgatgggtaacagtcttggcggtttcgctaaatactggcaggcgtttcgtcagtatccccgtttacagggcggcttcgtctgggactgggtggatcagtcgctgattaaatatgatgaaaacggcaacccgtggtcggcttacggcggtgattttggcgatacgccgaacgatcgccagttctgtatgaacggtctggtctttgccgaccgcacgccgcatccagcgctgacggaagcaaaacaccagcagcagtttttccagttccgtttatccgggcaaaccatcgaagtgaccagcgaatacctgttccgtcatagcgataacgagctcctgcactggatggtggcgctggatggtaagccgctggcaagcggtgaagtgcctctggatgtcgctccacaaggtaaacagttgattgaactgcctgaactaccgcagccggagagcgccgggcaactctggctcacagtacgcgtagtgcaaccgaacgcgaccgcatggtcagaagccgggcacatcagcgcctggcagcagtggcgtctggcggaaaacctcagtgtgacgctccccgccgcgtcccacgccatcccgcatctgaccaccagcgaaatggatttttgcatcgagctgggtaataagcgttggcaatttaaccgccagtcaggctttctttcacagatgtggattggcgataaaaaacaactgctgacgccgctgcgcgatcagttcacccgtgcaccgctggataacgacattggcgtaagtgaagcgacccgcattgaccctaacgcctgggtcgaacgctggaaggcggcgggccattaccaggccgaagcagcgttgttgcagtgcacggcagatacacttgctgatgcggtgctgattacgaccgctcacgcgtggcagcatcaggggaaaaccttatttatcagccggaaaacctaccggattgatggtagtggtcaaatggcgattaccgttgatgttgaagtggcgagcgatacaccgcatccggcgcggattggcctgaactgccagctggcgcaggtagcagagcgggtaaactggctcggattagggccgcaagaaaactatcccgaccgccttactgccgcctgttttgaccgctgggatctgccattgtcagacatgtataccccgtacgtcttcccgagcgaaaacggtctgcgctgcgggacgcgcgaattgaattatggcccacaccagtggcgcggcgacttccagttcaacatcagccgctacagtcaacagcaactgatggaaaccagccatcgccatctgctgcacgcggaagaaggcacatggctgaatatcgacggtttccatatggggattggtggcgacgactcctggagcccgtcagtatcggcggaattccagctgagcgccggtcgctaccattaccagttggtctggtgtcaaaaataataataaccgggcaggccatgtctgcccgtatttcgcgtaaggaaatccattatgtactatttaaaaaacacaaacttttggatgttcggtttattctttttcttttacttttttatcatgggagcctacttcccgtttttcccgatttggctacatgacatcaaccatatcagcaaaagtgatacgggtattatttttgccgctatttctctgttctcgctattattccaaccgctgtttggtctgctttctgacaaactcggaacttgtttattgcagcttataatggttacaaataaagcaatagcatcacaaatttcacaaataaagcatttttttcactgcattctagttgtggtttgtccaaactcatcaatgtatcttatcatgtctggatctcccaacaagcttgaattcataacttcgtatagcatacattatacgaagttattaattaagtcccggcatcccgttcgcggacccaggcccgggggattgtccggatgtgcgggcagcccggacggcgtgggttgcggactttcggcggggcggcccaaatggccctttaaacgtgtgtatacggacgcgccgggccagtcggccaacacaacccaccggaggcggtagccgcgtttggctgtggggtgggtggttccgccttgcgtgagtgtcctttcgacccccccccctcccccgggtcttgctaggtcgcgatctgtggtcgcaatgaagaccaatccgctacccgcaaccccttccgtgtggggcgggagtaccgtggaactcccccccaccacacgcgataccgcggggcagggcctgcttcggcgcgtcctgcgccccccgatctctcgccgcgacggcccagtgctccccagggggtcgggaccccggagggcggccagcacgctgtggttgcttggcctggacggcacagacgcgccccctggggcgctgacccccaacgacgataccgaacaggccctggacaagatcctgcggggcaccatgcgcgggggggcggccctgatcggctccccgcgccatcatctaacccgccaagtgatcctgacggatctgtgccaacccaacgcggatcgtgccgggacgctgcttctggcgctgcggcaccccgccgacctgcctcacctggcccaccagcgcgccccgccaggccggcagaccgagcggctgggcgaggcctggggccagctgatggaggcgaccgccctggggtcggggcgagccgagagcgggtgcacgcgcgcgggcctcgtgtcgtttaacttcctggtggcggcgtgtgccgcctcgtacgacgcgcgcgacgccgccgatgcggtacgggcccacgtcacggccaactaccgcgggacgcgggtgggggcgcgcctggatcgtttttccgagtgtctgcgcgccatggttcacacgcacgtcttcccccacgaggtcatgcggtttttcggggggctggtgtcgtgggtcacccaggacgagctagcgagcgtcaccgccgtgtgcgccgggccccaggaggcggcgcacaccggccacccgggccggccccgctcggccgtgatcctcccggcgtgtgcgttcgtggacctggacgccgagctggggctggggggcccgggcgcggcgtttctgtacctggtattcacttaccgccagcgccgggaccaggagctgtgttgtgtgtacgtgatcaagagccagctccccccgcgcgggttggagccggccctggagcggctgtttgggcgcctccggatcaccaacacgattcacggcaccgaggacatgacgcccccggccccaaaccgaaaccccgacttccccctcgcgggcctggccgccaatccccaaaccccgcgttgctctgctggccaggtcacgaacccccagttcgccgacaggctgtaccgctggcagccggacctgcgggggcgccccaccgcacgcacctgtacgtacgccgcctttgcagagctcggcatgatgcccgaggatagtccccgctgcctgcaccgcaccgagcgctttggggcggtcagcgtccccgttgtcatcctggaaggcgtggtgtggcgccccggcgagtggcgggcctgcgcgtgagcgtagcaaacgccccgcccacacaacgctccgcccccaaccccttccccgctgtcactcgttgttcgttgacccggacgtccgccaaataaagccactgaaacccgaaacgcgagtgttgtaacgtcctttgggcgggaggaagccacaaaatgcaaatgggatacatggaaggaacacacccccgtgactcaggacatcggcgtgtccttttgggtttcactgaaactggcccgcgccccacccctgcgcgatgtggataaaaagccagcgcgggtggtttagggtaccacaggtgggtgctttggaaacttgtcggtcgccgtgctcctgtgagcttgcgtccctccccggtttcctttgcgctcccgccttccggacctgctctcgcctatcttctttggctctcggtgcgattcgtcaggcagtggccttgtcgaatctcgaccccaccactcgccggacccgccgacgtcccctctcgagcccgccgaaacccgccgcgtctgttgaaatggccagccgccccgccgcatcctctcccgtcgaagcgcgggccccggttgggggacaggaggccggcggccccagcgcagccacccagggggaggccgccggggcccctctcgcccgcggccaccacgtgtactgccagcgagtcaatggcgtgatggtgctttccgacaagacgcccgggtccgcgtcctaccgcatcagcgatagcaactttgtccaatgtggttccaactgcaccatgatcatagacggagacgtggtgcgcgggcgcccccaggacccgggggccgcggcatcccccgctcccttcgttgcggtgacaaacatcggagccggcagcgacggcgggaccgccgtcgtggcattcgggggaaccccacgtcgctcggcggggacgtctaccggtacccagacgaccgacgtccccaccgaggcccttgggggcccccctcctcctccccgcttcaccctgggtggcggctgttgttcctgtcgcgacacacggcgccgctctgcggtattcgggggggagggggatcccgtcggccccgcggagttcgtctcggacgaccggtcgcccgattccgactcggatgactcggaggacaccgactcggagacgctgtcacacgcctcctcggacgtgtccggcggggccacgtacgacgacgcccttgactccgattcgtcatcggatgactccctgcagatagatggccccgtgtgtcgcccgtggagcaatgacaccgcgcccctggatgtttgccccgggacccccggcccgggcgccgacgccggtggtccctcagcggtagacccacacgcaccgacgccaggggccggcgctggtcttgcggccgatcccgccgtggcccgggacgacgcggaggggctttcggacccccggccacgtctgggaacgggcacggcctaccccgtccccctggaactcacgcccgagaacgcggaggccgtggcgcgctttctgggagatgccgtgaaccgcgaacccgcgctcatgctggagtacttttgccggtgcgcccgcgaggaaaccaagcgtgtcccccccaggacattctgcagcccccctcgcctcacggaggacgactttgggcttctcaactacgcgctcgtggagatgcagcgcctgtgtctggacgttcctccggtcccgccgaacgcatacatgccctattatctcagggagtatgtgacgcggctggtcaacgggttcaagccgctggtgagccggtccgctcgcctttaccgcatcctgggggttctggtgcacctgcggatccggacccgggaggcctcctttgaggagtggctgcgatccaaggaagtggccctggactttggcctgacggaaaggcttcgcgagcacgaagcccagctggtgatcctggcccaggctctggaccattacgactgtctgatccacagcacaccgcacacgctggtcgagcgggggctgcaatcggccctgaagtatgaggagttttacctaaagcgctttggcgggcactacatggagtccgtcttccagatgtacacccgcatcgccggctttttggcctgccgggccacgcgcggcatgcgccacatcgccctggggcgagaggggtcgtggtgggaaatgttcaagttctttttccaccgcctctacgaccaccagatcgtaccgtcgacccccgccatgctgaacctggggacccgcaactactacacctccagctgctacctggtaaacccccaggccaccacaaacaaggcgaccctgcgggccatcaccagcaacgtcagcgccatcctcgcccgcaacgggggcatcgggctatgcgtgcaggcgtttaacgactccggccccgggaccgctagcgtcatacccgccctcaaggtcctcgactcgctggtggcggcgcacaacaaagagagcgcgcgtccaaccggcgcgtgcgtgtacctggagccgtggcacaccgacgtgcgggccgtgctccggatgaagggggtcctcgccggcgaagaggcccagcgctgcgacaatatcttcagcgccctctggatgccagacctgtttttcaagcgcctgattcgccacctggacggcgagaagaacgtcacatggaccctgttcgaccgggacaccagcatgtcgctcgccgactttcacggggaggagttcgagaagctctaccagcacctcgaggtcatggggttcggcgagcagatacccatccaggagctggcctatggcattgtgcgcagtgcggccacgaccgggagccccttcgtcatgttcaaagacgcggtgaaccgccactacatctacgacacccagggggcggccatcgccggctccaacctctgcaccgagatcgtccatccggcctccaagcgatccagtggggtctgcaatctgggaagcgtgaatctggcccgatgcgtctccaggcagacgtttgactttgggcggctccgcgacgccgtgcaggcgtgcgtgctgatggtgaacatcatgatcgacagcacgctacaacccacgccccagtgcacccgcggcaacgacaacctgcggtccatgggaatcggcatgcagggcctgcacacggcctgcctgaaactggggctggatctggagtctgtcgaatttcaggacctgaacaaacacatcgccgaggtgatgctgctgtcggcgatgaagaccagcaacgcgctgtgcgttcgcggggcccgtcccttcaaccactttaagcgcagcatgtatcgcgccggccgctttcactgggagcgctttccggacgcccggccgcggtacgagggcgagtgggagatgctacgccagagcatgatgaaacacggcctgcgcaacagccagtttgtcgcgctgatgcccaccgccgcctcggcgcagatctcggacgtcagcgagggctttgcccccctgttcaccaacctgttcagcaaggtgacccgggacggcgagacgctgcgccccaacacgctcctgctaaaggaactggaacgcacgtttagcgggaagcgcctcctggaggtgatggacagtctcgacgccaagcagtggtccgtggcgcaggcgctcccgtgcctggagcccacccaccccctccggcgattcaagaccgcgtttgactacgaccagaagttgctgatcgacctgtgtgcggaccgcgccccctacgtcgaccatagccaatccatgaccctgtatgtcacggagaaggcggacgggaccctcccagcctccaccctggtccgccttctggtccacgcatataagcgcggactaaaaacagggatgtactactgcaaggttcgcaaggcgaccaacagcggggtctttggcggcgacgacaacattgtctgcacgagctgcgcgctgtgaccgacaaaccccctccgcgccaggcccgccgccactgtcgtcgccgtcccacgcgctcccccgctgccatggattccgcggccccagccctctcccccgctctgacggcccatacgggccagagcgcgccggcggacctggcgatccagattccaaagtgccccgaccccgagaggtacttctacacctcccagtgtcccgacattaaccacctgcgctccctcagcatccttaaccgctggctggaaaccgagcttgttttcgtgggggacgaggaggacgtctccaagctttccgagggcgagctcagcttttaccgcttcctcttcgctttcctgtcggccgccgacgacctggttacggaaaacctgggcggcctctccggcctgtttgagcagaaggacattctccactactacgtggagcaggaatgcatcgaagtcgtacactcgcgcgtgtacaacatcatccagctggtgctttttcacaacaacgaccaggcgcgccgcgagtacgtggccggcaccatcaaccacccggccatccgcgccaaggtggactggctggaagcgcgggtgcgggaatgcgcctccgttccggaaaagttcatcctcatgatcctcatcgagggcatcttttttgccgcctcgtttgccgccatcgcctaccttcgcaccaacaaccttctgcgggtcacctgccagtcaaacgacctcatcagccgggacgaggccgtgcacacgacggcctcgtgttacatctacaacaactacctcggcgggcacgccaagcccccgcccgaccgcgtgtacgggctgttccgccaggcggtcgagatcgagatcggatttatccgatcccaggcgccgacggacagccatatcctgagcccggcggcgctggcggccatcgaaaactacgtgcgattcagcgcggatcgcctgttgggccttatccacatgaagccactgttttccgccccaccccccgacgccagctttccgctgagcctcatgtccaccgacaaacacaccaattttttcgagtgtcgcagcacctcctacgccggggcggtcgtcaacgatctgtgagggtcgcggcgcgcttctacccgtgtttgcccataataaacctctgaaccaaactttgggtctcattgtgattcttgtcagggacgcgggggtgggagaggataaaaggcggcgcaaaaagcagtaaccaggtccgtccagattctgagggcataggataccataattttattggtgggtcgtttgttcggggacaagcgcgctcgtctgacgtttgggctactcgtcccagaatttggccaggacgtccttgtagaacgcgggtgggggggcctgggtccgcagctgctccagaaacctgtcggcgatatcaggggccgtgatatgccgggtcacaatagatcgcgccaggttttcgtcgcggatgtcctggtagataggcaggcgtttcagaagagtccacggcccccgctccttggggccgataagcgatatgacgtacttaatgtagcggtgttccaccagctcggtgatggtcatgggatcggggagccagtccagggactctggggcgtcgtggatgacgtggcgtcgccggctggccacataactgcggtgctcttccagcagctgcgcgttcgggacctggacgagctcgggcggggtgagtatctccgaggaggacgacctggggccggggtggcccccggtaacgtcccggggatccagggggaggtcctcgtcgtcttcgtatccgccggcgatctgttgggttagaatttcggtccacgagacgcgcatctcggtgccgccggcggccggcggcaaagggggcctggtttccgtggagcgcgagctggtgtgttcccggcggatggcccgccgggtctgagagcgactcgggggggtccagtgacattcgcgcagcacatcctccacggaggcgtaggtgttattgggatggaggtcggtgtggcagcggacaaagagggccaggaactgggggtagctcatcttaaagtactttagtatatcgcgacagttgatcgtgggaatgtagcaggcgctaatatccaacacaatatcacagcccatcaacaggaggtcagtgtctgtggtgtacacgtacgcgaccgtgttggtgtgatagaggttggcgcaggcatcgtccgcctccagctgacccgagttaatgtaggcgtaccccagggcccggagaacgcgaatacagaacagatgcgccagacgcagggccggcttcgagggcgcggcggacggcagcgcggctccggacccggccgtcccccgggtccccgaggccagagaggtgccgcgccggcgcatgttggaaaaggcagagctgggtctggagtcggtgatgggggaaggcggtggagaggcgtccacgtcactggcctcctcgtccgtccggcattgggccgtcgtgcgggccaggatggccttggctccaaacacaaccggctccatacaattgaccccgcgatcggtaacgaagatggggaaaagggacttttgggtaaacacctttaataagcgacagaggcagtgtagcgtaatggcctcgcggtcgtaactggggtatcggcgctgatatttgaccaccaacgtgtacatgacgttccacaggtccacggcgatgggggtgaagtacccggccggggccccaaggccctggcgcttgaccagatggtgtgtgtgggcaaacttcatcatcccgaacaaacccatgtcaggtcgattgtaactgcggatcggcctaactaaggcgtggttggtgcgacggtccgggacacccgagcctgtctctctgtgtatggtgacccagacaacaacaccgacacaagaggacaataatccgttaggggacgctctttataatttcgatggcccaactccacgcggattggtgcagcaccctgcatgcgccggtgtgggccaaacttccccccgctcattgcctcttccaaaagggtgtggcctaacgagctgggggcgtatttaatcaggctagcgcggcgggcctgccgtagtttctggctcggtgagcgacggtccggttgcttgggtcccctggctgccagcaaaaccccaccctcgcagcggcatacgccccctccgcgtcccgcacccgagaccccggcccggctgccctcaccaccgaagcccacctcgtcactgtggggtgttcccagcccgcattgggatgacggattcccctggcggtgtggcccccgcctcccccgtggaggacgcgtcggacgcgtccctcgggcagccggaggagggggcgccctgccaggtggtcctgcagggcgccgaacttaatggaatcctacaggcgtttgccccgctgcgcacgagccttctggactcgcttctggttatgggcgaccggggcatccttatccataacacgatctttggggagcaggtgttcctgcccctggaacactcgcaattcagtcggtatcgctggcgcggacccacggcggcgttcctgtctctcgtggaccagaagcgctccctcctgagcgtgtttcgcgccaaccagtacccggacctacgtcgggtggagttggcgatcacgggccaggccccgtttcgcacgctggttcagcgcatatggacgacgacgtccgacggcgaggccgttgagctagccagcgagacgctgatgaagcgcgaactgacgagctttgtggtgctggttccccagggaacccccgacgttcagttgcgcctgacgaggccgcagctcaccaaggtccttaacgcgaccggggccgatagtgccacgcccaccacgttcgagctcggggttaacggcaaattttccgtgttcaccacgagtacctgcgtcacatttgctgcccgcgaggagggcgtgtcgtccagcaccagcacccaggtccagatcctgtccaacgcgctcaccaaggcgggccaggcggccgccaacgccaagacggtgtacggggaaaatacccatcgcaccttctctgtggtcgtcgacgattgcagcatgcgggcggtgctccggcgactgcaggtcgccgggggcaccctcaagttcttcctcacgacccccgtccccagtctgtgcgtcaccgccaccggtcccaacgcggtatcggcggtatttctcctgaaaccccagaagatttgcctggactggctgggtcatagccaggggtctccttcagccgggagctcggcctcccgggcctctgggagcgagccaacagacagccaggactccgcgtcggacgcggtcagccacggcgatccggaagacctcgatggcgctgcccgggcgggagaggcgggggcctcgcacgcctgtccgatgccgtcgtcgaccacgcgggtcactcccacgaccaagcgggggcgctcggggggcgaggatgcgcgcgcggacacggccctaaagaaacctaagacggggtcgcccaccgcacccccgcccacagatccagtccccctggacacggaggacgactccgatgcggcggacgggacggcggcccgtcccgccgctccagacgcccggagcggaagccgttacgcgtgttactttcgcgacctcccgaccggagaagcaagccccggcgccttctccgccttccgggggggcccccaaaccccgtatggttttggattcccctgacggggcggggccttggcggccgcccaactctcgcaccatcccgggttaatgtaaataaacttggtattgcccaacactctcccgcgtgtcgcgtgtggttcatgtgtgtgcctggcgtcccccaccctcgggttcgtgtatttcctttccctgtccttataaaagccgtatgtggggcgctgacggaaccaccccgcgtgccatcacggccaaggcgcgggatgctccgcaacgacagccaccgggccgcgtccccggaggacggccagggacgggtcgacgacggacggccacacctcgcgtgcgtgggggccctggcgcgggggttcatgcatatctggcttcaggccgccacgctgggttttgcgggatcggtcgttatgtcgcgcgggccgtacgcgaatgccgcgtctggggcgttcgccgtcgggtgcgccgtgctgggctttatgcgcgcaccccctcccctcgcgcggcccaccgcgcggatatacgcctggctcaaactggcggccggtggagcggcccttgttctgtggagtctcggggagcccggaacgcagccgggggccccgggcccggccacccagtgcctggcgctgggcgccgcctatgcggcgctcctggtgctcgccgatgacgtctatccgctctttctcctcgccccggggcccctgttcgtcggcaccctggggatggtcgtcggcgggctgacgatcggaggcagcgcgcgctactggtggatcggtgggcccgccgcggccgccttggccgcggcggtgttggcgggcccgggggcgaccaccgccagggactgcttctccagggcgtgccccgaccaccgccgcgtctgcgtcatcgtcgcaggcgagtctgtttcccgccgccccccggaggacccagagcgacccggggaccccgggccaccgtcccccccgacaccccaacgatcccaggggccgccggccgatgaggtcgcaccggccggggtagcgcggcccgaaaacgtctgggtgcccgtggtcacctttctgggggcgggcgcgctcgccgtcaagacggtgcgagaacatgcccgggaaacgccgggcccgggcctgccgctgtggccccaggtgtttctcggaggccatgtggcggtggccctgacggagctgtgtcaggcgcttatgccctgggaccttacggacccgctgctgtttgttcacgccggactgcaggtcatcaacctcgggttggtgtttcggttttccgaggttgtcgtgtatgcggcgctagggggtgccgtgtggatttcgttggcgcaggtgctggggctccggcgtcgcctgcacaggaaggaccccggggacggggcccggttggcggcgacgcttcggggcctcttcttctccgtgtacgcgctggggtttggggtgggggcgctgctgtgccctccggggtcaacgggcgggtggtcgggcgattgatatatttttcaataaaaggcattagtcccgaagaccgccggtgtgtgatgatttcgccataacacccaaaccccggatggggcccgggtataaattccggaaggggacacgggctaccctcactaccgagggcgcttggtcgggaggccgcatcgaacgcacacccccatccggtggtccgtgtggaggtcgtttttcagtgcccggtctcgctttgccgggaacgctagccgatccctcgcgagggggaggcgtcgggcatggccccggggcgggtgggccttgccgtggtcctgtggagcctgttgtggctcggggcgggggtggccgggggctcggaaactgcctccaccgggcccacgatcaccgcgggagcggtgacgaacgcgagcgaggcccccacatcggggtcccccgggtcagccgccagcccggaagtcacccccacatcgaccccaaaccccaacaatgtcacacaaaacaaaaccacccccaccgagccggccagccccccaacaacccccaagcccacctccacgcccaaaagcccccccacgtccacccccgaccccaaacccaagaacaacaccacccccgccaagtcgggccgccccactaaaccccccgggcccgtgtggtgcgaccgccgcgacccattggcccggtacggctcgcgggtgcagatccgatgccggtttcggaattccacccgcatggagttccgcctccagatatggcgttactccatgggtccgtcccccccaatcgctccggctcccgacctagaggaggtcctgacgaacatcaccgccccacccgggggactcctggtgtacgacagcgcccccaacctgacggacccccacgtgctctgggcggagggggccggcccgggcgccgaccctccgttgtattctgtcaccgggccgctgccgacccagcggctgattatcggcgaggtgacgcccgcgacccagggaatgtattacttggcctggggccggatggacagcccgcacgagtacgggacgtgggtgcgcgtccgcatgttccgccccccgtctctgaccctccagccccacgcggtgatggagggtcagccgttcaaggcgacgtgcacggccgccgcctactacccgcgtaaccccgtggagtttgtctggttcgaggacgaccgccaggtgtttaacccgggccagatcgacacgcagacgcacgagcaccccgacgggttcaccacagtctctaccgtgacctccgaggctgtcggcggccaggtccccccgcggaccttcacctgccagatgacgtggcaccgcgactccgtgatgttctcgcgacgcaatgccaccgggctggccctggtgctgccgcggccaaccatcaccatggaatttggggtccggcatgtggtctgcacggccggctgcgtccccgagggcgtgacgtttgcctggttcctgggggacgacccctcaccggcggctaagtcggccgttacggcccaggagtcgtgcgaccaccccgggctggctacggtccggtccaccctgcccatttcgtacgactacagcgagtacatctgtcggttgaccggatatccggccgggattcccgttctagagcaccacggcagtcaccagcccccacccagggaccccaccgagcggcaggtgatcgaggcgatcgagtgggtggggattggaatcggggttctcgcggcgggggtcctggtcgtaacggcaatcgtgtacgtcgtccgcacatcacagtcgcggcagcgtcatcggcggtaacgcgagacccccccgttacctttttaatatctatatagtttggtccccctctatcccgcccaccgctgggcgctataaagccgccaccctctcttccctcaggtcatccttggtcgatcccgaacgacacacggcgtggagcaaaacgcctccccctgagccgctttcctaccaacacaacggcatgcctctgcgggcatcggaacacgcctaccggcccctgggccccgggacaccccccatgcgggctcggctccccgccgcggcctgggttggcgtcgggaccatcatcgggggagttgtgatcattgccgcgttggtcctcgtgccctcgcgggcctcgtgggcactttccccatgcgacagcggatggcacgagttcaacctcgggtgcatatcctgggatccgacccccatggagcacgagcaggcggtcggcggctgtagcgccccggcgaccctgatcccccgcgcggctgccaaacagctggccgccgtcgcacgcgtccagtcggcaagatcctcgggctactggtgggtgagcggagacggcattcgggcctgcctgcggctcgtcgacggcgtcggcggtattgaccagttttgcgaggagcccgcccttcgcatatgctactatccccgcagtcccgggggctttgttcagtttgtaacttcgacccgcaacgcgctggggctgccgtgaggcgcgtgtactgcggtctgtctcgtctcctcttctccccttccctccccctccgcatcccaggatcacaccggccaacgagggttgggggggtccggcacggacccaaaataataaacacacaatcacgtgcgataaaaagaacacgcggtcccctgtggtgtttttggttatttttattaaatctcgtcgacaaacagggggaaaagggcgtggtctagcgacggcagcacgggcggaggcgttcaccggctccggcgtccttcgcgtttaagcttggtcaggagggcgctcagggcggcgacgttggtcgggccgtcgttggtcagggcgttggctcgatggcgggcgaggacgggcgaggggctcaacggcgggggcgggggtccggtgcggcccgggggggaaaatagggcggatcccccccagtcgtacaggggattttccgcctcaatgtacggggaggccggcgctgcattcgccgtgttcacgcagacgttttcgtagacccgcatccatggtatttcctcgtagacacgccccccgtcctcgctcacggtctcgtatattgactcgtcgtcctcgtagggggcgtgccgttcgcgggccgaggcggcgtgggtggctttgcggcgggcgtcgtcgtcgtcgtcgtcggccgtcagatacgtggcttccatctggtcgggttctccctccggggcgggtccccacacccgtggccgatcgaggctccccagagacgcgcgccggacaagaagggggcacgtcgccgccggcggtcgcctgtcgggtcccgcgacgttacgggccgggaggcgcgggggcacctcccccatgtgcgtgtaatacgtggccggctgtgcggccgcagcggggggctcggcgaccgggtcgtccgcatccggaagcgggggccccgcgccgtccgcacggcgcctccggaaccgccgggtggacggcgcgggggtcgagtgtaggcgaggtcgggggaggggcgggggctcgttgtcgcgccgcgcccgctgaatcttttcccgacaggtcccaccccccgcgcgatgcccccccgggccgcgggccatgtcgtccgggggaggccccgcggaccacgtcgtccggcgagacgccacgagccgcaggatggactcgtagtggagcgacggcgccccgctgcggagcagatccgcggccagggcggccccgaaccaagccttgatgctcaactccatccgggcccagctgggggcggtcatcgtggggaacaggggggcggtggtccgacagaaacgctcctggctgtccaccgcggcccgcagatactcgttgttcaggctgtcggtggcccagacgccgtacccggtgagggtcgcgttgatgatatactgggcgtggtgatggacgatcgacagaacctccaccgtggataccacggtatccacggtcccgtacgtaccgccgctccgcttgccggtctgccacaggttggctaggcacgtcaggtggcccaggacgtcgctgaccgccgccctgagcgccatgcactgcatggagccggtcgtgccgctgggaccccggtccagatggcgcgcgaacgtttccgcgggcgcctccgggctgccgccgagcgggaggaaccggcgattggagggactcagccggtgacatacgtgcttgtccatcgtccacagcatccaggacgcccaccggtacagcacggagacgtaggccaggagctcgttgagccgcagtgcggtgtcggtgctggggcggcttgggtccgccgggcgcataaagaacatgtactgctgaatccgatggagggcgtcgcgcaggccggccacggtggcggcgtacttggccgccgcggccccgctcttgaacggggtgcgcgccagcagctttggcgccagggtgggccgcagcagcacgtgaaggctggggtcgcagtcgcccacggggtcctcggggacgtccaggccgctgggcaccaccgtctgcaggtacttccagtactgcgtgaggatggcgcggctcaactggccgccgggcagctccacctcgcccagcgcctgggtggcggccgaagcgtagtgccggatgtactcgtagtgcgggtcgctggcgagcccgtccacgatcaaactctcgggaaccgtgttgtgttgccgcgcggccaaccggacgctgcgatcggtgcaggtcagaaacgccggctgcgcgtcgtcggagcgctgccgcaaggcgcccacggccgcgctaaggagcccctccggggtggggagcagacacccgccgaagatgcgccgctcgggaacgcccgcgttgtcgccgcggatcaggttggcaggcgtcaggcaccgcgccagccgcagggagctcgcgccgcgcgtccggcgctgcatggtgacgcccgttcggtcgggacccgccggtcggagttatgccgcgtccagggccatcggggcgctttttatcgggaggagcttatgggcgtggcgggcctcccagcccggtcgcgcgcctccccgacacgtgcgcccgcagggcggcggccccctcgtctcccatcagcagtttcctaaactgggacatgatgtccaccacgcggacccgcgggcccaacacggacccgccgcttacgggggcgggggggaagggctccaggtccttgagcagaaaggcggggtctgccgtcccggacacgggggcccggggcgcggaggaggcggggcgcagatccacgtgctccgcggccgcgcggacgtccgcccagaacttggcgggggtggtgcgcgcgtacaggggctgggtcgctcggaggacacacgcgtagcgcaggggggtgtacgtgcccacctcgggggccgtgaatcccccgtcaaacgcggccagtgtcacgcacgccaccacggtgtcggcaaagcccagcagccgctgcaggacgagcccggcggccagaatggcgcgcgtggtcgcagcgtcgtcccggcgccggtgcgcgtccccgcacgcccgggcgtactttaaggtcactgtcgccagggccgtgtgcagcgcgtacaccgcagcgcccagcacggcgttgagcccgctgttggcgagcagccggcgcgctgcggtgtcgcccagcgcctcgtgctcggcccccacgaccgcggggcttcccaggggcagggcgcgaaacagctcctcccgcgccacgtccgcaaaggcggggtggtgcacgtgcgggtgcaggcgcgcccccacgaccaccgagagccactggaccgtctgctccgccatcaccgccaacacatccagcacgcgccccaggaaggcggcctcccgcgtcaaaacgcaccggacggcgtcgggattgaagcgggcgagcagggccccggtggccaggtacgtcatgcggccggcatagcgggcggccacgcgacagtcgcggtccagcagcgcgcgcaccccgggccagtacagcagggaccccagcgagctgcgaaacaccgcggcgtcggggccggattggggggacactaacccccccgcgctcagtaacggcacggccgcggccccgacgggacgcaacgccgtgaggctcgcgaactgccgcctcagctcggcagccctgtcgtccaggtccgacccgcgcgcctctgcgtgaaggcgcgtcccgcacacccacccgttgatggccagccgcacgacggcatccgccaaaaagctcatcgcctgggcggggctggtttttgttcgacgatccgtcaggtcaagaatcccatcgcccgtgatataccaggccaacgcctcgccctgctgcagggtttggcggaaaaacaccgcggggttgtcgggggaggcgaagtgcatgacccccacgcgcgataacccgaacgcgctatccggacacgggtaaaacccggccggatgccccagggctagggcggagcgcacggactcgtcccacacggcaacctgaggggccagtcgatccaacgggaatgccgcccggagctccgggcccggcacgcgtccctccagaacctccaccttgggcggggaacgggccccgccgccgtcctccggcccgacgtcttccgggtagtcgtcctcctcgtactgcagttcctctaggaacagcggcgacggcgccacccgcgaaccgccgacccgccccaaaatagcccgcgcgtcgacgggacccaggtatcccccctgccgggcctgcggaggaccgcggggaacctcatcatcatcgtccaggcgaccgcgcaccgactggctacgggccgcatcgggcccggggcgctgccgggacgctcggcgatgggatgagggcggggcttccgacgcgcgccgtcgtcgggctcgcgggccttcccgtcgacggcgcacgggcggctcgtcgcccgccatctcctccagagcctctagctcgctgtcgtcatccccgcggaacaccgcacgcaggtaccccatgaaccccaccccatcgcccgctggctcgtccgccacgggcgaggcgcgggggcgggtggatgcgcgcctcctgcgccccgcgggttcgcgagccgacatggtggcgatagacgcgggttatcggatgtccgctaccccccaaaaaagaaaaagaccccacagcgcggatggaggtcggggtaggtgccgccggaccccctcgcgatgggaatggacgggagcgacggggccggcgcaaaaaacgcagtatctcccgcgaaggctacccgccgccccagcccccggccaaatgcggaaacggtcccgcgctctcgcctttatacgcgggccgccctgcgacacaatcacccgtccgtggtttcgaatctacacgacaggcccgcagacgcggctaacacacacgccggcaacccagaccccagtgggttggttgcgcggtcccgtctcctggctagttctttcccccaccaccaaataatcagacgacaaccgcaggtttttgtaatgtatgtgctcgtgtttattgtggatacgaaccggggacgggaggggaaaacccagacgggggatgcgggtccggtcgcgccccctacccaccgtactcgtcaattccaagggcatcggtaaacatctgctcaaactcgaagtcggccatatccagagcgccgtagggggcggagtcgtggggggtaaatcccggacccggggaatccccgtcccccaacatgtccagatcgaaatcgtctagcgcgtcggcatgcgccatcgccacgtcctcgccgtctaagtggagctcgtcccccaggctgacatcggtcgggggggccgtcgacagtctgcgcgtgtgtcccgcggggagaaaggacaggcgcggagccgccagccccgcctcttcgggggcgtcgtcgtccgggagatcgagcaggccctcgatggtagacccgtaattgtttttcgtacgcgcgcggctgtacgcgtgttcccgcatgaccgcctcggagggcgaggtcgtgaagctggaatacgagtccaacttcgcccgaatcaacaccataaagtacccagaggcgcgggcctggttgccatgcagggtgggaggggtcgtcaacggcgcccctggctcctccgtagccgcgctgcgcaccagcgggaggttaaggtgctcgcgaatgtggtttagctcccgcagccggcgggcctcgattggcactccccggacggtgagcgctccgttgacgaacatgaagggctggaacagacccgccaactgacgccagctctccaggtcgcaacagaggcagtcaaacaggtcgggccgcatcatctgctcggcgtacgcggcccataggatctcgcgggtcaaaaatagatacaaatgcaaaaacagaacacgcgccagacgagcggtctctcggtagtacctgtccgcgatcgtggcgcgcagcatttctcccaggtcgcgatcgcgtccgcgcatgtgcgcctggcggtgcagctgccggacgctggcgcgcaggtaccggtacagggccgagcagaagttggccaacacggttcgatagctctcctcccgcgcccgtagctcggcgtggaagaaacgagagagcgcttcgtagtagagcccgaggccgtcgcgggtggccggaagcgtcgggaaggccacgtcgccgtgggcgcgaatgtcgatttgggcgcgttcggggacgtacgcgtccccccattccaccacatcgctgggcagcgttgataggaatttacactcccggtacaggtcggcgttggtcggtaacgccgaaaacaaatcctcgttccaggtatcgagcatggtacatagcgcggggcccgcgctaaagcccaagtcgtcgaggagacggttaaagagggcggcgggggggacgggcatgggcggggagggcatgagctgggcctggctcaggcgccccgttgcgtacagcggaggggccgccggggtgtttttgggacccccggccgggcgggggggtggtggcgaagcgccgtccgcgtccatgtcggcaaacagctcgtcgaccaagaggtccattgggtggggttgatacgggaaagacgatatcgggcttttgatgcgatcgtccccgcccgcccagagagtgtgggacgcccgacggcgcgggaagagaaaaacccccaaacgcgttagaggaccggacggaccttatggggggaagtgggcagcgggaaccccgtccgttcccgaggaatgacagcccgtggtcgccaccccgcatttaagcaacccgcacgggccgccccgtacctcgtgacttccccccacattggctcctgtcacgtgaaggcaaaccgagggcggctgtccaacccaccccccgccacccagtcacggtccccgtcggattgggaaacaaaggcacgcaacgccaacaccgaatgaacccctgttggtgctttattgtctgggtacggaagtttttcactcgacgggccgtctggggcgagaagcggagcgggctggggctcgaggtcgctcggtggggcgcgacgccgcagaacgccctcgagtcgccgtggccgcgtcgacgtcctgcaccacgtctggattcaccaactcgttggcgcgctgaatcaggtttttgccctcgcagaccgtcacgcggatggtggtgatgccaaggagttcgttgaggtcttcgtctgtgcgcggacgcgacatgtcccagagctggaccgccgccatccgggcatgcatggccgccaggcgcccaaccgcggcgcagaagacgcgcttgttaaagccggccacccggggggtccatggcgcgtcggggtttgggggggcggtgctaaagtgcagctttctggccagcccctgcgcgggtgtcttggatcgggttggcgccgtcgacgcgggggcgtctgggagtgcggcggattctggctgggccgatttcctgccgcgggtggtctccgccgccggggccgcgggggccttagtcgccacccgctgggttcggggggcccggggggcggtggtgggtgtgcgtccggcccctccggacccagcgggcggcggaggcgcccgcgcaggccccggggcggacaaaaccgccccggaaacgggacgccgcgtccgggggacctccgggtgttcgtcgtcttcggatgacgagcccccgtagagggcataatccgactcgtcgtactggacgaaacggacctcgccccttgggcgcgcgcgtgtctgtagggcgccacggcgggaggtgtcaggcggactatcgggactcgccatacatgaagacggggtgtagtacagatcctcgtactcatcgcgcggaacctcccgcggacccgacttcacggagcggcgagaggtcatggttccacgaacacgctagggtcggatgcgcggacaattaggcctgggttcggacggcgggggtggtgcaggtgtggagaggtcgagcgataggggcggcccgggagagaagagagggtccgcaaaacccactggggatgcgtgagtggccctctgtgggcggtgggggagagtcttataggaagtgcatataaccacaacccatgggtctaaccaatccccaggggccaagaaacagacacgccccaaacggtctcggtttccgcgaggaaggggaagtcctgggacaccctccacccccacccctcaccccacacagggcgggttcaggcgtgcccggcagccagtagcctctggcagatctgacagacgtgtgcgataatacacacgcccatcgaggccatgcctacataaaagggcaccagggcccccggggcagacatttggccagcgttttgggtctcgcaccgcgcgcccccgatcccatcgcgcccgccctcctcgccgggcggctccccgtgcgggcccgcgtctcccgccgctaaggcgacgagcaagacaaacaacaggcccgcccgacagacccttctgggggggcccatcgtccctaacaggaagatgagtcagtggggatccggggcgatccttgtccagccggacagcttgggtcgggggtacgatggcgactggcacacggccgtcgctactcgcgggggcggagtcgtgcaactgaacctggtcaacaggcgcgcggtggcttttatgccgaaggtcagcggggactccggatgggccgtcgggcgcgtctctctggacctgcgaatggctatgccggctgacttttgtgcgattattcacgcccccgcgctatccagcccagggcaccacgtaatactgggtcttatcgactcggggtaccgcggaaccgttatggccgtggtcgtagcgcctaaaaggacgcgggaatttgcccccgggaccctgcgggtcgacgtgacgttcctggacatcctggcgacccccccggccctcaccgagccgatttccctgcggcagttcccgcaactggcgcccccccctccaaccggggccgggatacgcgcagatccttggttggagggggcgctcggggacccaagcgtgactcctgccctaccggcgcgacgccgagggcggtccctcgtctatgccggcgagctgacgccggttcagacggaacacggggacggcgtacgagaagccatcgccttccttccaaaacgcgaggaggatgccggtttcgacattgtcgtccgtcgcccggtcaccgtcccggcaaacggcaccacggtcgtgcagccatccctccgcatgctccacgcggacgccgggcccgcggcctgctatgtgctggggcggtcgtcgctcaacgcccgcggcctcctggtcgttcctacgcgctggctccccgggcacgtatgtgcgtttgttgtttacaaccttacgggggttcctgtgaccctcgaggccggcgccaaggtcgcccagctcctggttgcgggggcggacgctcttccttggatccccccggacaactttcacgggaccaaagcgcttcgaaactaccccaggggtgttccggactcaaccgccgaacccaggaacccgccgctcctggtgtttacgaacgagtttgacgcggaggcccccccgagcgagcgcgggaccgggggttttggctctaccggtatttagcccatagcttggggttcgttccgggcaataaaaaacgtttgtatctcatctttcctgtgtgtagttgtttctgttggatgcctgtgggtctatcacacccgcccctccatcccacaaacacagaacacacgggttggatgaaaacacgcatttattgacccaaaacacacggagctgctcgagatgggccagggcgaggtgcggttggggaggctgtaggtctgggaacggacacgcggggacacgattccggtttggggtccgggagggcgtcgccgtttcgggcggcaggcgccagcgtaacctccgggggcggcgtgtgggggtgccccaaggagggcgcctcggtcaccccaagcccccccgagcgggttcccccggcaaccccgaaggcggagaggccaagggcccgttcggcgatggccacatcctccatgaccacgtcgctctcggccatgctccgaatagcctgggagacgagcacatccgcggacttgtcagccgcccccacggacatgtacatctgcaggatggtggccatacacgtgtccgccaggcgccgcatcttgtcctgatgggccgccacggccccgtcgatcgtgggggcctcgagcccggggtggtggcgcgccagtcgttctaggttcaccatgcaggcgtggtacgtgcgggccaaggcgcgggccttcacgaggcgtcgggtgtcgtccagggaccccagggcgtcatcgagcgtgatgggggcgggaagtagcgcgttaacgaccaccagggcctcctgcagccgcggctccgcctccgagggcggaacggccgcgcggatcatctcatattgttcctcggggcgcgctccccagccacatatagccccgagaagagaagccatcgcgggcgggtactggcccttgggcgcgcggacgcaatggggcaggaagacgggaaccgcggggagaggcgggcggccgggactcccgtggaggtgaccgcgctttatgcgaccgacgggtgcgttattacctcttcgatcgccctcctcacaaactctctactgggggccgagccggtttatatattcagctacgacgcatacacgcacgatggccgtgccgacgggcccacggagcaagacaggttcgaagagagtcgggcgctctaccaagcgtcgggcgggctaaatggcgactccttccgagtaaccttttgtttattggggacggaagtgggtgggacccaccaggcccgcgggcgaacccgacccatgttcgtctgtcgcttcgagcgagcggacgacgtcgccgcgctacaggacgccctggcgcacgggaccccgctacaaccggaccacatcgccgccaccctggacgcggaggccacgttcgcgctgcatgcgaacatgatcctggctctcaccgtggccgtcaacaacgccagcccccgcaccggacgcgacgccgccgcggcgcagtatgatcagggcgcgtccctacgctcgctcgtggggcgcacgtccctgggacaacgcggccttaccacgctatacgtccaccacgaggcgcgcgtgctggccgcgtaccgcagggcgtattatggaagcgcgcagagtcccttctggtttcttagcaaattcgggcctgacgaaaaaagcctggtgctcaccactcggtactacctgcttcaggcccagcgtctggggggcgcgggggccacgtacgacctgcaggccatcaaggacatctgcgccacctacgcgattccccacgccccccgccccgacaccgtcagcgccgcgtccctgacctcgtttgccgccatcacgcggttctgttgcacgagccagtacgcccgcggggccgcggcggccgggtttccgctttacgtggagcgccgtattgcggccgacgtccgcgagaccagtgcgctggagaagttcataacccacgatcgcagttgcctgcgcgtgtccgaccgtgaattcattacgtacatttacctggcccattttgagtgtttcagccccccgcgcctagccacgcatcttcgggccgtgacgacccaggaccccaaccccgcggccaacacggagcagccctcgcccctgggcagggaggccgtggaacaatttttttgccacgtgcgcgcccaactgaatatcggggagtacgtcaaacacaacgtgaccccccgggagaccgtcctggatggcgatacggccaaggcctacctgcgcgctcgcacgtacgcgcccggggccctgacgcccgcccccgcgtattgcggggccgtggactccgccaccaaaatgatggggcgtttggcggacgccgaaaagctcctggtcccccgcgggtggcccgcgtttgcgcccgccagtcccggggaggatacggcgggcggcacgccgcccccacagacctgcggaatcgtcaagcgcctcctgagactggccgccacggaacaacaggacaccacgcccccggcgatcgcggcgcttatccgtaatgcggcggtgcagactcccctgcccgtctaccggatatccatggtccccacgggacaggcatttgccgcgctggcctgggacgactgggcccgcataacgcgggacgctcgcctggccgaagcggtcgtgtccgccgaagcggcggcgcaccccgaccacggcgcgctgggcaggcggctcacggatcgcatccgcgcccagggccccgtgatgccccctggcggcctggatgccggggggcagatgtacgtgaatcgcaacgagatatttaacggcgcgctggcaatcacaaacatcatcctggatctcgacatcgccctgaaggagcccgtcccctttcgccggctccacgaggccctgggccactttaggcgcggggctctggcggcggttcagctcctgtttcccgcggcccgcgtggaccccgacgcatatccctgttattttttcaaaagcgcatgtcggcccggcccggcgtccgtgggttccggcagcggactcggcaacgacgacgacggggactggtttccctgctacgacgacgccggtgatgaggagtgggcggaggacccgggcgccatggacacatcccacgatcccccggacgacgaggttgcctactttgacctgtgccacgaagtcggccccacggcggaacctcgcgaaacggattcgcccgtgtgttcctgcaccgacaagatcggactgcgggtgtgcatgcccgtccccgccccgtacgtcgtccacggttctctaacgatgcggggggtggcacgggtcatccagcaggcggtgctgttggaccgagattttgtggaggccatcgggagctacgtaaaaaacttcctgttgatcgatacgggggtgtacgcccacggccacagcctgcgcttgccgtattttgccaaaatcgcccccgacgggcctgcgtgcggaaggctgctgccagtgtttgtgatcccccccgcctgcaaagacgttccggcgtttgtcgccgcgcacgccgacccgcggcgcttccattttcacgccccgcccacctatctcgcttccccccgggagatccgtgtcctgcacagcctgggtggggactatgtgagcttctttgaaaggaaggcgtcccgcaacgcgctggaacactttgggcgacgcgagaccctgacggaggtcctgggtcggtacaacgtacagccggatgcgggggggaccgtcgaggggttcgcatcggaactgctggggcggatagtcgcgtgcatcgaaacccactttcccgaacacgccggcgaatatcaggccgtatccgtccggcgggccgtcagtaaggacgactgggtcctcctacagctagtccccgttcgcggtaccctgcagcaaagcctgtcgtgtctgcgctttaagcacggccgggcgagtcgcgccacggcgcggacattcgtcgcgctgagcgtcggggccaacaaccgcctgtgcgtgtccttgtgtcagcagtgctttgccgccaaatgcgacagcaaccgcctgcacacgctgtttaccattgacgccggcacgccatgctcgccgtccgttccctgcagcacctctcaaccgtcgtcttgataacggcgtacggcctcgtgctcgtgtggtacaccgtcttcggtgccagtccgctgcaccgatgtatttacgcggtacgccccaccggcaccaacaacgacaccgccctcgtgtggatgaaaatgaaccagaccctattgtttctgggggccccgacgcacccccccaacgggggctggcgcaaccacgcccatatctgctacgccaatcttatcgcgggtagggtcgtgcccttccaggtcccacccgacgccacgaatcgtcggatcatgaacgtccacgaggcagttaactgtctggagaccctatggtacacacgggtgcgtctggtggtcgtagggtggttcctgtatctggcgttcgtcgccctccaccaacgccgatgtatgtttggtgtcgtgagtcccgcccacaagatggtggccccggccacctacctcttgaactacgcaggccgcatcgtatcgagcgtgttcctgcagtacccctacacgaaaattacccgcctgctctgcgagctgtcggttcagcggcaaaacctggttcagttgtttgagacggacccggtcaccttcttgtaccaccgccccgccatcggggtcatcgtaggctgcgagttgatgctacgctttgtggccgtgggtctcatcgtcggcaccgctttcatatcccggggggcatgtgcgatcacataccccctgtttctgaccatcaccacctggtgttttgtctccaccatcggcctgacagagctgtattgtattctgcggcggggcccggcccccaagaacgcagacaaggccgccgccccggggcgatccaaggggctgtcgggcgtctgcgggcgctgttgttccatcatcctgtcgggcatcgcaatgcgattgtgttatatcgccgtggtggccggggtggtgctcgtggcgcttcactacgagcaggagatccagaggcgcctgtttgatgtatgacgtcacatccaggccggcggaaaccggaacggcatatgcaaactggaaactgtcctgtcttggggcccacccacccgacgcgtcatatgtaaatgaaaatcgttcccccgaggccatgtgtagcctggatcccggacctggttaaccacccgccggtcctacgcgaactggaggataagcgcggggtgcggctgcggtgtgcgcggccgtttagcgtcgggacgattaaggacgtctctgggtccggcgcgtcctcggcgggagagtacacgataaacgggatcgtgtaccactgccactgtcggtatccgttctcaaaaacatgctggatgggggcctccgcggccctacagcacctgcgctccatcagctccagcggcatggccgcccgcgcggcagagcatcgacgcgtcaagattaaaattaaggcgtgatctccaaccccccatgaatgtgtgtaaccccccccccaaaaaaataaagagccgtaacccaaccaaaccaggcgtggtgtgagtttgtggacccaaagccctcagagacaatgcgacaggccagtatggaccgtgatacttttatttattaactcacaggggcgcttaccgccacaggaataccagaataatgaccaccacaatcgcgaccaccccaaatacagcatggcgccacaccacgccacaacagccctgtcgccggtatggggcatgatcagacgagccgcgcgccgcgcgttgggccctgtacagctcgcgcgaattgaccctaggaggccgccacgcgcccgagttttgcgttcgtcgctggtcgtcgggcgccaaagccccggacggctgttcggtcgaacgaacggccacgacagtggcataggttggggggtggtccgacatagcctcggcgtacgtcgggaggcccgacaagaggtcccttgtgatgtcgggtggggccacaagcctggtttccggaagaaacaggggggttgccaataacccgccagggccaaaactccggcgctgcgcacgtcgttcggcgcggcgccgggcgcgccgagcggctcgctgggcggcttggcgtgagcggccccgctccgacgcctcgccctctccggaggaggttggcggaattggcacggacgacaggggcccagcagagtacggtggaggtgggtccgtgggggtgtccagatcaataacgacaaacggcccctcgttcctaccagacaagctatcgtaggggggcgggggatcagcaaacgcgttccccgcgctccatagacccgcgtcgggttgcgccgcctccgaagccatggatgcgccccaaagccacgactcccgcgcgctaggtccttggggtaagggaaaaggccctactccccatccaagccagccaagttaacgggctacgccttcggggatgggactggcaccccggcggattttgttgggctggtacgcgtcgcccaaccgagggccgcgtccacgggacgcgccttttataaccccgggggtcattcccaacgatcacatgcaatctaactggctgggccctggaaatggcggacaccttcctggacaacatgcgggttgggcccaggacgtacgccgacgtacgcgatgagatcaataaaagggggcgtgaggaccgggaggcggccagaaccgccgtgcacgacccggagcgtcccctgctgcgctctcccgggctgctgcccgaaatcgcccccaacgcatccttgggtgtggcacatcgaagaaccggcgggaccgtgaccgacagtccccgtaatccggtaacccgttgagtcccgggtacgaccatcacccgagtctctgggcggagggtggttcccccccgtgtctctcgagatgagccagacccaacccccggccccagttgggccgggcgacccagatgtttacttaaaaggcgtgccgtccgccggcatgcaccccagaggtgttcacgcacctcgaggacacccgcgcatgatctccggacccccgcaacggggtgataatgatcaagcggcggggcaatgtggagattcgggtctactacgagtcggtgcggacactacgatctcgaagccatctgaagccgtccgaccgccaacaatccccaggacaccgcgtgttccccgggagccccgggttccgcgaccaccccgagaacctagggaacccagagtaccgcgagctcccagagaccccagggtaccgcgtgaccccagggatccacgacaaccccggtctcccagggagccccggaccccacgcaccccccgcgaaccacgtacggctcgcgggtctgtatagcccgggcaagtatgcccccctggcgagcccagaccccttctccccacaagatggagcatacgctcgggcccgcgtcgggatccacaccgcggttcgcgtcccgcccaccggaagcccaacccacacgcacttgcggcaagacccgggcgatgagccaacctcggatgactcagggctctaccctctggacgcccgggcgcttgcgcacctggtgatgttgcccgcggaccaccgggccttctttcgaaccgtggtcgaggtgtctcgcatgtgcgctgcaaacgtgcgcgatcccccgcccccggctacaggggccatgttgggccgccacgcgcggctggtccacacccagtggctccgggccaaccaagagacgtcgcccctgtggccctggcggacggcggccattaactttatcaccaccatgaccccccgcgtccaaacccaccgacacatgcacgacctgttgatggcctgtgctttctggtgctgtctgacacacgcatcgacgtgttcgtacgcggggctgtactcgacccactgcctgcatctgtttggtgcgtttgggtgtggggacccggccctaaccccacccctgtgctagggcaatttgtacccttaataaattttacaaacagattttatcgcatcgtgtcttattgcgggggagaaaaccgatgtcggcatagaaaaccgccatgattctaagacgtccgaacgcgagtgggtggggaacaacccataccggacagatgccgatgagccacccgcacccttgggtgcgggaggtacggggtggtttgttcatcctatggttccgaccccacaaacagcccccagagtcggtttgggtatggttacattttctgtctggtggtcgggcttgtttcttccttgccactccccacccacccactccccacccacccactccccacccacccactccccacccacccactccccacccacccactccccacccacccactccccacccacccactccccacccacccactccccacccacccactccccacccacccactccccacccacccactccccacccacccaaaaatcaaccgggagacaacattgccaatcgaacccaatttaatgtagttaaaggctgggtgcaaattgcggggtgatgggggggaagagagacgacaagaaggacgcgcgtgtcgatgcggtcttttagcggagcagccacatcaggagcgccccaaatccgcccgacagaacggccacgaggagacaggcgatcaccatgccgacgcagcgggtgcgtctgcgtcaacgccttaataccgactgttggcggcccatgcgtacgaggaagtcgttggccgcctcgtcttcgctttccgagtagtaggcttcgaccgaaactggcgaggccgtgggataaagcggcacggacatgtcggatcgcgctgaggagttgggatcggagagccgggacgtcatcgaggccggaagaaagctccgggtgggaagttgcggtcgctgtgactcacgatttttaatttgctgcggctaggcggaccaccggccctttgtgcgcctcgggcaattgacgtcacataccacgcaatcccacacaggacggcccccaggccggaagccccccggagccaccgagcggccagccaggcgacaaacagggagggggcgtcgacagcctggagggccatcggggagacaacggccgtgtagcccgggggtcgcgggtgtggcgagggcgcggtcgacgtggcgaggggcgggcggtcatgtcgggggggtccgcgttcgtcggaaatcgcgattagctcgtctccgacgtccacctcgccggcggtcgcccagttcggcgaccgacgtggggcctcgggatggggcgccttaccagaagacggacgaatcggaggcctgggagtaacggcgatcgggccttccggatccaaaggttgtgagctggcggcgagattgatgcccgtcgctacgggggtatacagacggagccgttggtgataagatctcaaagccggatccattggtggagggagagtcgggtctctccgggggggccagccacgggacctggtcgcgttctccctcgctgtccgagctccagtccgcgtacagctcgctgtcggccacgcgaatgtacgtgggccccttacccgaggccctgcttttaaccgcccgccaggcacgcctgcgccaacaggtcatacacgcccacaccgacaaccccagcgcagacagcagcagggcggcccccatcaccgcccctaaccgcagggcgccgtgggttgggggcgcgtggggaggggccccgacgtgcgggtgggtgggctcggccaaatccgcgccgcgctgtgggaggggctgttccaccaccgcgttccggtactgcgccgcggtgctgatggtaatgtggccccaggcgtgaatatggtcgttgacgtacaccacacacagatacaggccggagtgttgtggggacgcgtcccggaactccagattgacggaggccgcctgccacgccagccccgggacgggctccatgtgagcctcggccgaacagcgcggtggggggtttgttctggaacaccccgcgtagctgcggacggccaggcgagacgtccacgtactcgcggcgcacggcgcgtcggccggggacagacattctgggagctgcgggtgatacagacacgattcgtatattcgcatctcggcacacgaggtcggcacgtcgaacctcaaccagacgacgtccatggagtaggtctggtcgtcgtgggcgatggcatggatggagacgttcgtgctgaacgtctccccgggggaaaacaggatagcttccggagtctccatacgcacggtcaccccacgcacatgtgagacttcgggggcgctgggccaagacctcgggggggcggggggaggcgggagccggggggtcccgctggcgggagtgccggcgagactttcgtcctcgccctcgtcattgtcatcctcgtcgtaatcggctggggtcgggggtggggtcggaactggggccggttgcaccaccaggaccaccgaggccacttggcgagccgggtcctttatgtcgcccacggacagggtatacaggccgctgtccgtctctcggaccccgtgaataaccagactccggttaaccacggccgcgcgctcctgccacacgaagtccgttcgtagacccccggtcgcagatggggccgggggggcgtacgccatcgccagcgggaccggagcgcgcatgcacgccgcatccacgaccgtctcgggcacctgcttggggggcatcagcgagacccacgacgggtgtaaggggccgcacccatccaggggttccacggcccatagtagtttctgggtcgggccgcgccccgtaggccccggagctggaagcaacgaaacgtcctcgccgacactcacccgtctccaggacgttttgggcgttcccgccaagcacgatacaacacaaacaccgagaagaaaccccaccaccgccccgcgatccatgtcccggggatagcagccgatcttcgggtaaaatgggagcccaacaaacagcaccgcaccaacccgccagaagagccaaagtcaacacaacaacgccttaaatgcgccgcgggccctctccccggcttcctgaactcctcccatccattctttgcttccttctttggtttccggggggggggggggaagaaagaaatggacatacacggatataggtaaataataccggtttattcccaactcagtgactgcggtcggttatgtggtgcccccggccagtggccgtggacctataccaacaggggaggcgttggggtggatgtcgtggggtccacggggggcgtcggaagcccagccgcccccgcgggctccgactcttcggcgatggccgtcagggagggcattggcgtgcgtgacgaccggcgccgggatttggggggggtgctcggatgcgatttgagctcggctccgaggcgggccatggccgcttcgttcaccgcgcatgagatgcccgtgggtatctgggggctgtaaatcgggcggcgggagcgtcggtagcggcgttgacatctgtgtataaagcaaatacagctccccagaaacaccagggctataatggacgcggggatggctatctggattatctgggtcaccgttagcgcatatcgcgagtcgcgggtcgctcgcgtggcattcgatgggggttcgtggttgaccccgtgaggttggggttttgggtctcccgtggggaagggtgtggtcgatgcttggggagcggggatggtggtcgagggggtggaggtggtggtcgagggggtggaggccgggttaggggcgggttggtatacgttcgccggggccagacgcggggccgaagacggaagcagtttcgggtcgcaggagccatgggccgagccgttgtacgccagagtaccttcggcggctatggccatccccaggacaaacaggctggcgtttggtgcgtccccgacccatacgcgtaacacgtacaccccggcatagtcacgcgtcgccctccggacccgcaaaagcggctgttgggccagattcagctccagggtgggatatgcggggctgtgagtgctgtcggtcgcgcgacacagggcaaatgccacggcggggcgacgtgggcacgcggtcaccgtgacgacatgcacgacccgtgggcatttgtgtcccatggggtagtgccacagctctacgaccccatcgtagtaggtggtgtgggggacctggtcccccacaaagcgaagctccccgagaataagcaggtcttcctccactacgccgtcgggccccaaggccccggcgtccacaaatgagtttgataccagactgaccgtggggccacggacaaccaggctggtggcacagacccagaggcccacgagcaccaggccctgcaacgggcggcacggcatcccgaaacgggacggttcgcgaaaaagctgtgggtgcgacaggcggaacaggtgcgcgtcccccgctaccgacttatcgactgtccgcctttccccccttccagactcgctttatatggagttaaggtcccatcccaaccccgcagacctgacccccccgcacccattaagggggggggtatctagtaaaacaagggctggtgcgaggacggctggtcgtcttcccggatgtgggggaggcgtatgcgctttggggctttccgagtgcggcggtgcatccagtacacaattccgcaaatgaccagggctgccaggagactgccgcccaccgcgccggcgatcaggcccatgttgttcggggtggccgggggatggtaaggcgtcgcggcgtcctggatcgacgggatgtgccagtttggtgggatttgcggcgccaccgtccccacggggtcctccaagagggccgaatcctcggggtcttccggggcgagttctggctgcgtggcgttgggggtctcggacagctccgggggcagcagggtgctcgtgtatggggccttgggcccgtgccacccggcgatcttcaagctgtatacggcgacggtgcgctggttctcggggatgaagcggggcagcatcccgatgctgtccaccgtcaccccctgctggtaggcctggggggagaggcaggctgacggggggatgcgcagcgggagggcgtacttacaggagcccttggctcggtgctccaggataaactgtgtaatctccgtccagtcgtttatcttcacgagccgcaggtacgtgccggcggtctcaaacgcgggggcgtgcatcaggaaccccaggttatcctcgctgacggcgctgaagctgtcatagtagttccagcggggctgcgttcggatgggacaggcccccagagacttgttgtaggagcattcggtgtactccatgaccgtgatggggatagcacagttgcctcccatccgaaaccaagcgatggtcaggttgtagggttgtttccggacgtcttcggaggccccgcggacaatctggggggcctccgacggtgcgtttaggagcacgctgcggcaggcgcgctccaacacggcgtagtaaaccgtgatcgggaggctggggggctggaacgggtccggtaggcccgcctggatgtggtacacgcgccggacccccggagggtcggtcagctggtccaggaccggaaggtctttgccgcgaaagcgattggggtcggccatcttgagagaggcatccgccaaggcatatttgccgcggaccccatggaggcccactatgacgacaaacaaaatcacggcccccaacctggcggcagccccccccataccggaacgcaccacacaaaagagaccttaaggataactgatgatcggggtagttggtcgttcgcactgaagcttatgaccgaacaactccctaacccctgctttttaaagacagactttgttatacccctcctcctcgtaaaatggcccctcccccttaggggattcgtcggtgtggtcggtatggacgataatgtcacacggccgggctaccgcgatctttgttgggggccggggccacggatttcctggttagcccggtgttgttgggtgccctccgcattcgccccccatccccctgccggacatggtttggggggcgcaccggtgatttataccatgccagctggtggtgtcgggagtttggacccgacatcacccatgcggagaagggggggggggaaaaaattatacgacaactgggtccatgtagggatggtaacgcccccacccgcggcacgtacgacgcaggagctcaagcagacacgccgcccccaggactacggcacacagcccaccgactacgagggggacggcaaagccccccagggggctggggtgaggggacactggggcgtgcgttaaggggtccgttgtgttggccgcaggtcccagatgggtggcggcaagaacagcccccacgaggcttcccaaaagccccagatgccagactgcgcgcagagacatcgcgacacacagaacgccaagtcgtgtgctgtttctccggatagccaggcctggctcagacgtccgttggccgtttcgggtgggttccgaggcccggaagtcgcgcatgcttcatgggtcccgggcatgtatttaactgcacccccgtccaatgaccgccccgcgcccaccacaccccaaaaacacccagagacgcatatcaactagatcccgccgcctttattgttcttgctttccgcgtgtgggctctccccatccccgccccataccctacccgcgttcgggcggcaggcacacgtaacgcacgctagggtgtgtgcgtcgcccgcgtctggaccaaccaccacacaggtgtgtcgccatagcaacaatacacacaaacgataaggtgtggatgacggtgctgacgacgaagagggtgtccagggcgggggaggcagtgaggaacgagaacagcggggtatgttgaggcgtcggaaccaagggtcgcccctttgaggggagttgggtcgtgggtcgagttgccagcggcccgatactggtggggggtgtcttcggtcgactggtctcggggcgcgcgggggagttgttgggaccggggggtgggactacgggacggttgggtttgtccttctcgtcatccccggccaacgggacggctggacccggggactggggtagggtgtcacgggtcccatctccccccttaagatgttcgccatccccggccccctcctcctcttcctcctcctcctccagtccgatacttggcatggggggtgtgtggtcgggcgtggtaaggctgatggcggtgggagagtcggtggtgccggtctgggtcatgttgggggcttcatgcgagggacgaccggtggtctggagttggggttgggtggtggaggagacgttggtgggaacccccgatacaccgacaagaaccaaaaggaatgggataatgggaacaacggcacgcatggcgcccggcgacatgatgccaaaaacaccacagacgcgggtcggggtctttttgtgccaacccgcaaacagcaccgccccccgggggcggtcatttctgttgaaacagcggcaaacaaagcagctctgcggcgctggggcgaagcgcgccgtcgaaggtgagggctttgcaaaccagatattcgacgtctatgtccatcttgtagtagcgggtccaggccggtcgggtgtaaggcgggcgattgttcccggccgcgcgggagcggtagcgcgaggtgaggcgcgattctggatgcggggaaaactcgtcaacgtggacctgggcctgtcggatgatgcgggtgatctgactgtcgcacgggccccttttggggccgcggggggccgagaacaaggacgcgttgtggacggcagtctcgaagatcaccagaccggcgctccaaatgtcgacggtcgtggtatacggatccccggccaggacctcgggggcgttggtgtcgatggttccggcgattccgtaggggaaggggcttgatcgggaaccctgcacgaagcacgcggcaccaaagtcccccaggcaaatgtcctcgggggtgttaataaaaatattttcggtcttaatgtcgcggtggataatgccctggcggtgaatgtagtcaacggcgcttaggagctgccgggagaccgctgcgatctgcgggcgtcccagtgggttcaggcgcctactcagataggtatacaggtcggcctggtacttggggaggaccagacacgtgaccccggagacgacatgcaggtccaggaggggcaggatcgccgggtggtccagtcgcctcagcagtcgcgcctcgtggctcgtgctcgtgtaccaccccgccttcacgattacccgttgggggtaatctgggtggctgctgtcaaagacacacccctccgatcctggggtgagcgctccgtggatcgtaaagcccatgccagtcaccagcttggccatggtcgaggggggcttgccgccgcggctgatggctcgagccgcctgcctgtccatggcgtccagctcttctgcggtaaatcccgtggccccaatctcatcccggctgcgtcgtcgtataccggggggagatgcgccacgcgggggagggatgtggtcgttggccccgataaggggaccggtcgcgtccccgggcagaaaaagctcctctgcgtattcctccggataggccacgtcgtccggggcgtcctcgtcgacatcgtccgcggcatccgcgctggggtcgtcctctatggggtagtcctggtttccgtacatctgggccaggatctcctgcagatgacacaggcgctcggcatcgccgggtggtgtggtgtgggaaggtttgggggtctccgggggcggggagtccaggcacgcgtcctcggctggggtataaaaggggccatgaggaaacacccgggacggctttgtctccggcgggacggcctcctccttcctcctgccctgtcccccgtaaacgcgacaaaacttacgacaggccattcgccgcaccgtgagtgccaaccaacgagcaccccgaacgacgggccccggggttttaaggagcggcagtttgacgacccaccccctgacctacccccccgtaaataaccctcccctcccccggacgcctccgctgccggtcgctccaagggcccccccgggaaggcgggtctgtggaccgtagggcccttaaatttttagagcagcccccgcgtcggcctgtctccccgccgtgcgtggccttacaaatctgcaagtgccccaaaccggacacgggcctgtaatataccaacatgggcgttgttgtcgtcaacgtaatgaccctccttgaccagaacaacgccctgccccggacttccgtcgacgcaagcccggccctgtggagcttcctgcttaggcagtgccgcattttggcatcagaacccctgggtaccccggtcgtcgttcgcccggccaaccttcgacggttggccgagccgctgatggacttacccaaacccacccgcccgatcgtgcgcactaggtcctgtcgctgccccccaaacaccaccacgggcctgtttgcggaggacagccccttggagagcaccgaggtcgtggacgccgtggcgtgcttccgactgttgcaccgagaccaacccagcccccctcgcctctaccacttgtgggtggtaggcgcggcggatctgtgtgtgccgtttctcgaatacgcccaaaaaatccggctcggggtaagatttatcgccatcaagaccccagacgcgtgggtgggagaaccgtgggccgtgccgactcggtttttgcccgagtggaccgtggcgtggaccccgttccccgcggcacccaaccaccccctggagaccctgctcagccggtacgaataccagtacggcgtggtcctgcccgggaccaacggacgggagcgcgattgtatgcgctggctgcggtccctgattgctctgcacaaaccccacccagctacctcccacccccttacgacgtcccattcggtgcggcgtccgtgttgtgcgtgtatgggtatgcccgagattttagacgagcaacccacatcaccgggccgtggtccgcaagaaacggaccctctgatcgccgttcgcggcgaacggcccagacttcctcacatctgctatccggttaccaccctgtagccccgatgtcaataaacccccaaacaccccccatgtacgcgtggtctgtttctctccgcccttcccgccattaagacgctgggacaaacgctttgattttggtcttttattttggggacatacaagggggtcggggcgaccggactcacggccggagaaacgtgtcgctgcacggataggggcaggcggtggagaagcgcattttccggcagccgtccagacacttgcggtcttctgctgcgcgacccgccccagaatcggatgggcccgggcgttccacggagctggtatcggccacgaccgcagacagccagggctgggagccctcctggggggtccagtcaaactccccaaactcatcctccagacgcacagcgagggacccgcggggttctggggtttccagcgtaacgggggagggggcatcctccgtgtcggactgggacgcgagcgtgtggtccgaaccggcggcctccagatcggtggcatcggagatttcatcatcgcttgtcgcgctgagatgaatctcgagattactaagatcacactccgggccgtaccgtctggcctccaaacaaggaagcttgcacacgggttctgcggtggcgtcgaatcgagcctccacctcccgtatggtgttgcgcaggtgcatgccccaggttccgccggacacctgcagcaagcggcaccacgtgcgcggggccagacgggctcggcagtatcccatcaggtaacagtcgcgtatcaggtggcgcaggcggttggcactgccgtgggggtcccgggcgacccgcaggacccgaaacagctgattgatacactggcgcatgtagcccaggtcgggggtccatcgtgcgctgctccgcctctgggcctggcgcaccgagcgccggagcattgcatttgggcttggggccgacggggtgggggcccggggctgcgtttcccgggtagaccggacccgccccatcttaggaaaaataaccccatcccgccgatcgggagagctagtgagccgcaggtttacccgggcccgcttgggtcgtgggggaatgtcgtcacaagaccagtcggacgtgtcgtcggggtcgtccgacaccgacgcatccgtttccgtccccgtggtggattccgccgacatgtccagaaaaaaccgccccccaagcctccggggggccctacggccaccgatgcggggggcttcctcctggtccccagactcggtcgaatccgatgctgtctcggattcgacctcagactccaaggctgtctcggattcgacctcagactccgatgagagggggcgggcagggcgcttgcgcttgcgcgtgcccaggggcggggatcggagagcgggacgccgcgcttttacacaaggcacaaaagcgcctggggaaatgtcggccatccagaaaacgtcccggaggaccacagtggctcccccccccccccccgacgagcaggaagcggtccacgcaacggtcgccgccggtcgcctcgacgagggcgttcctcctgcgggaaggcacgaacgcgggtgagccccctcctccgcccccgcgtcccccctcctccgcccccgcgtcccccctcctccgccccctgcgtcccccctcctccgccccccgcgtcccccctcctccgcccccgcgtcccccctcctccgcccccgcgtcccccctcctccgcccccgcgtcccccctcctccgcccccgcgtcccccctcctccgcccacccaaggtgcttacccgtgcaaaaaaggcggaccggtgggtttctgtcgtcggaggcccccggggtgcgtcccctgtgtttcgtgggtggggtgggcgggtctttcccccccgcgtccgcgtgtccctttccgatgcgatcccgatcccgagccggggcgtcgcgatgccgacgccgtccgctccgacggccctctgcgactcccgctcccggtccgcgtgctccgcagccgctcccgtcgttcgtggccggcgccgtctgcgggcgtcggtcgcgccgggcctttatgtgcgccggagagacccgccccccgccgcccgggtccgcccccggggccggcgcggagtcgggcacggcgccagtgctcgcacttcgccctaataatatatatatattgggacgaagtgcgaacgcttcgcgttctcacttcttttacccggcggccccgcccccttggggcggtcccgcccgccggccaatgggggggcggcaaggcgggcggtggcggccgctctagaagatctggcctccgcgccgggttttggcgcctcccgcgggcgcccccctcctcacggcgagcgctgccacgtcagacgaagggcgcagcgagcgtcctgatccttccgcccggacgctcaggacagcggcccgctgctcataagactcggccttagaaccccagtatcagcagaaggacattttaggacgggacttgggtgactctagggcactggttttctttccagagagcggaacaggcgaggaaaagtagtcccttctcggcgattctgcggagggatctccgtggggcggtgaacgccgatgattatataaggacgcgccgggtgtggcacagctagttccgtcgcagccgggatttgggtcgcggttcttgtttgtggatcgctgtgatcgtcacttggtgagtagcgggctgctgggctggccggggctttcgtggccgccgggccgctcggtgggacggaagcgtgtggagagaccgccaagggctgtagtctgggtccgcgagcaaggttgccctgaactgggggttggggggagcgcagcaaaatggcggctgttcccgagtcttgaatggaagacgcttgtgaggcgggctgtgaggtcgttgaaacaaggtggggggcatggtgggcggcaagaacccaaggtcttgaggccttcgctaatgcgggaaagctcttattcgggtgagatgggctggggcaccatctggggaccctgacgtgaagtttgtcactgactggagaactcggtttgtcgtctgttgcgggggcggcagttatggcggtgccgttgggcagtgcacccgtacctttgggagcgcgcgccctcgtcgtgtcgtgacgtcacccgttctgttggcttataatgcagggtggggccacctgccggtaggtgtgcggtaggcttttctccgtcgcaggacgcagggttcgggcctagggtaggctctcctgaatcgacaggcgccggacctctggtgaggggagggataagtgaggcgtcagtttctttggtcggttttatgtacctatcttcttaagtagctgaagctccggttttgaactatgcgctcggggttggcgagtgtgttttgtgaagttttttaggcaccttttgaaatgtaatcatttgggtcaatatgtaattttcagtgttagactagtaaattgtccgctaaattctggccgtttttggcttttttgttagacgaagcttgatccaccggatccccgcggatggtgagcaagggcgaggaggataacatggccatcatcaaggagttcatgcgcttcaaggtgcacatggagggctccgtgaacggccacgagttcgagatcgagggcgagggcgagggccgcccctacgagggcacccagaccgccaagctgaaggtgaccaagggtggccccctgcccttcgcctgggacatcctgtcccctcagttcatgtacggctccaaggcctacgtgaagcaccccgccgacatccccgactacttgaagctgtccttccccgagggcttcaagtgggagcgcgtgatgaacttcgaggacggcggcgtggtgaccgtgacccaggactcctccctgcaggacggcgagttcatctacaaggtgaagctgcgcggcaccaacttcccctccgacggccccgtaatgcagaagaagaccatgggctgggaggcctcctccgagcggatgtaccccgaggacggcgccctgaagggcgagatcaagcagaggctgaagctgaaggacggcggccactacgacgctgaggtcaagaccacctacaaggccaagaagcccgtgcagctgcccggcgcctacaacgtcaacatcaagttggacatcacctcccacaacgaggactacaccatcgtggaacagtacgaacgcgccgagggccgccactccaccggcggcatggacgagctgtacaaggacccatgatagagatctatcgatcctgaattcgatcagacatgataagatacattgatgagtttggacaaaccacaactagaatgcagtgaaaaaaatgctttatttgtgaaatttgtgatgctattgctttatttgtaaccattataagctgcaataaacaagttaacaacaacaattgcattcattttatgtttcaggttcagggggaggtgtgggaggttttttatcgataccgtcgacctcgagggggggcccggtacccagcgtgcgccgtgctctgttggtttcacctgtggcagcccgggccccccgcgggcgcgcgcgcgcgcaaaaaaggcgggcggcggtccgggcggcgtgcgcgcgcgcggcgggcgttgggggcggggccgcgggagcgggggaggagcgggggaggagcgggggaggagcgggggaggagcggggggaggagcggggggaggaacggggggaggagcggggggaggagcgggggaggagcggagcgggggaggagcgggggaggagcgggggaggagcgggggaggagcggggggaggagcggggggaggaacggggggaggagcggggggaggagcgggggaggagcagccagaccccggaaacgggccccccccaaaacacaccccccgggggtcgcgcgcggccctttaaaggcgggcggcgggcagcccgggccccccgcggccgagactagcgagttagacaggcaagcactactcgcctctgcacgcacatgcttgcctgtcaaactctaccaccccggcacgctctctgtctccatggcccgccgccgccatcgcggcccccgccgcccccggccgcccgggcccacgggcgcggtcccaaccgcacagtcccaggtaacctccacgcccaactcggaacccgtggtcaggagcgcgcccgcggccgccccgccgccgccccccgccagtgggcccccgccttcttgttcgctgctgctgcgccagtggctccacgttcccgagtccgcgtccgacgacgacgacgacgactggccggacagccccccgcccgagccggcgccagaggcccggcccaccgccgccgccccccgcccccggtccccaccgcccggcgcgggcccggggggcggggctaacccctcccaccccccctcacgccccttccgccttccgccgcgcctcgccctccgcctgcgcgtcaccgcagagcacctggcgcgcctgcgcctgcgacgcgcgggcggggagggggcgccgaagccccccgcgacccccgcgacccccgcgacccccacgcgggtgcgcttctcgccccacgtccgggtgcgccacctggtggtctgggcctcggccgcccgcctggcgcgccgcggctcgtgggcccgcgagcgggccgaccgggctcggttccggcgccgggtggcggaggccgaggcggtcatcgggccgtgcctggggcccgaggcccgtgcccgggccctggcccgcggagccggcccggcgaactcggtctaacgttacacccgaggcggcctgggtcttccgcggagctcccgggagctccgcaccaagccgctctccggagagacgatggcaggagccgcgcatatatacgcttggagccggcccgcccccgaggcgggcccgccctcggagggcgggactggccaatcggcggccgccagcgcggcggggcccggccaaccagcgtccgccgagtcttcggggcccggcccactgggcggtaactcccgcccagtgggccgggccgcccacttcccggtatggtaattaaaaacttgcagaggcagatccccctgcttcatccccgtggcccgttgctcgcgtttgctggcggtgtccccggaagaaatatatttgcatgtctttagttctatgatgacacaaaccccgcccagcgtcttgtcattggcgaattcgaacacgcagatgcagtcggggcggcgcggtcccaggtccacttcgcatattaaggtgacgcgtgtggcctcgaacaccgagcgaccctgcagcgacccgcttaacagcgtcaacagcgtgccgcagatctcgagctcaagcttcgaattctgcagtcgacggtaccgcgggccccgatatccaattgcgggcgctgggtggtctctggccgcgcccactacaccagccaatccgtgtcggggaggtggaaagtgaaagacacgggcaccacacaccagcgggtcttttgtgttggccctaataaaaaaaactcaggggatttttgctgtctgttgggaaataaaggtttacttttgtatcttttccctgtctgtgttggatgtatcgcgggggtgcgtgggagtgggggtgcgtgggagtgggggtgcgtgggagtgggggtgcgtgggagtgggggtgcgtgggagtgggggtgcgtgggagtgggggtgcgtgggagtgggggtgcgtgggagtgggggtgcgtgggagtgggggtgcgtgggagtggggggtgcgtgggtgggggggtgcgtgggtgtgggggtgcgtgggagtgggggtgcgtgggagtgggggtgcgtgggagtgggggtgccatgttgggcaggctctggtgttaaccacagagccgcggcccgggctgcctgaccaccgatccccgaaagcatcctgccactggcatggagccagaaccacagtgggttgggtgtgggtgttaagtttccgcgagcgcctgcccgcccggactgacctggcctctggccgccacaaagggcgggggggggggttaactacactatagggcaacaaaggatgggaggggtagcggggcgggacggggcgcccaaaagggggtcggccacaccacagacgtgggtgttggggggtggggcggaggggtggggggggagacagaaacaggaacatagttagaaaacaagaatgcggtgcagccagagaatcacaggagacgaggggatgggcgtgttggttaccaacccacacccaggcatgctcggtggtatgaaggagggggggcggtgtttcttagagaccgccgggggacgtggggttggtgtgcaaaggcacgcgcacccgcgccggccaggtgggccggtaccccatccccccctcccccgacccttcccacccccgcgtgccagagatcaccccggtcccccggcacccgccactcctccatatcctcgctttaggaacaactttaggggggggtacacacgcgccgtgcatttccttccacacccccccccctcccccgcactcccccccccccaggcagtaagacccaaacatagagagccaggcacaaaaacacaggcggggtgggacacatgccttcttggagtacgtgggtcattggcgtggggggttacagcgacaccggccgaccccctggcggtcttccagccggcccttagataagggggcagttggtggtcggacgggtaagtaacagagtctaactaagggtgggagggggggaaaataacgggctggtgtgctgtaacacgagcccacccgcgagtggcgtggccgaccttagcctctggggcgccccctgtcgtttgggtccccccccctctattggggagaagcaggtgtctaacctacctggaaacgcggcgtctttgttgaacgacaccggggcgccctcgacgagtgggataacgggggaggaagggagggaggagggtactgggggtgaagggggggggaagaagcgagaacaggaaaggcgacggagcccggcagaacaccgagaaaaacgcagcgcatgcgccgggccgttgtggggccccgggccggggccccttgggtccgccggggccccgggccgggccgccacgggggccggccgttggcggtaaccccgagtgttcatctcaggccccgggccgggaacccggaaaagcctccggggggcctttttcgcgtcgcgtgccggcgagcgggtccggacggggcccggaccgccgcggtcgggggcccctcgtcccgggccgtacgcggccttcgccccgtgaggggacagacgaacgaaacattccggcgacggaacgaaaaacaccccagacgggttaaagaaacagaaaccgcaacccccaccacccccgaaacggggaaaacgaaaaaacagaccagcggccggccggcgcttagggggaggatgtcgccgacgccccttggccgccccggctgcaggggggcccggagagccgcggcacccggacgcgcccggaaagtctttcgcaccaccggcgatcggcacggccgcgcccccgcttttataaaggctcagatgacgcagcaaaaacaggccacagcaccacatgggtaggtgatgtaattttattttcctcgtctgcggcctaatggatttccgggcgcggtgcccctgtctgcagagcacttaacggattgatatctcgcgggcacgcgcgcccttaatggaccggcgcggggcggggggccggatacccacacgggcggggggggggtgtcgcgggccgtctgctggcccgcggccacataaacaatgactcggggcctttctgcctctgccgcttgtgtgtgcgcgcgccggctctgcggtgtcggcggcggcggcggcggtggccgccgtgttcggtctcggtagccggccggcgggtggactcgcggggggccggagggtggaaggcaggggggtgtaggatgggtatcaggacttccacttcccgtccttccatcccccgttcccctcggttgttcctcgcctcccccaacaccccgccgctttccgttggggttgttattgttgtcgggatcgtgcgggccgggggtcgccggggcaggggcgggggcgtgggcgggggtgctcgtcgatcgaccgggctcagtgggggcgtggggtgggtgggagaaggcgaggagactggggtgggggtgtcggtgggtggttgttttttttttttgtggttgttttttgtgtctgtttccgtcccccgtcacccccctccctccgtcccctccgtccccccgtcgcgggtgtttgtgtttgtttattccgacatcggtttatttaaaataaacacagccgttctgcgtgtctgttcttgcgtgtggctgggggcttatatgtggggtcccgggggcgggatggggtttagcggcggggggcggcgcgccggacggggcgctggagataacggcccccggggaacgggggaccggggctgggtatcccgaggtgggtgggtgggcggcggtggccgggccgggccgggccgggccgggtgggcggggtttggaaaaacgaggaggaggaggagaaggcggggggggagacggggggaaagcaaggacacggcccggggggtgggagcgcgggccgggccgctcgtaagagccgcgacccggccgccggggagcgttgtcgccgtcggtctgccggcccccgtccctcccttttttgaccaaccagcgccctcccccccaccaccattcctactaccaccaccaccaccacccccaccaccgacacctcccgcgcacccccgcccacatccccccaccccgcaccacgagcacggggtgggggtagcaggggatcaaaggggggcaaagccggcggggcggttcgggggggcgggagaccgagtaggcccgcccatacgcggcccctcccggcagccacgccccccagcgttgggtgtcacggggaaagagcaggggagagggggggagagggggagagggggggagagggggagaggggggagagggggagaggggggggggagaggggagaggggggggagaggggagagggggggagaggggagagggggggagaggggagagggggggagagggggtatataaaccaacgaaaagcgcgggaacggggatacggggcttgtgtggcacgacgtcgtggttgtgttactgggcaaacacttggggactgtaggtttctgtgggtgccgaccctaggcgctatggggattttgggttgggtcgggcttattgccgttggggttttgtgtgtgcgggggggcttgtcttcaaccgaatatgttattcggagtcgggtggctcgagaggtgggggatatattaaaggtgccttgtgtgccgctcccgtctgacgatcttgattggcgttacgagaccccctcggctataaactatgctttgatagacggtatatttttgcgttatcactgtcccggattggacacggtcttgtgggataggcatgcccagaaggcatattgggttaacccctttttatttgtggcgggttttctggaggacttgagtcaccccgcgtttcctgccaacacccaggaaacagaaacgcgcttggccctttataaagagatacgccaggcgctggacagtcgcaagcaggccgccagccacacacctgtgaaggctgggtgtgtgaactttgactattcgcgcacccgccgctgtgtagggcgacaggatttgggacctaccaacggaacgtctggacggaccccggttctgccgccggacgatgaagcgggcctgcaaccgaagcccctcaccacgccgccgcccatcatcgccacgtcggaccccaccccgcgacgggacgccgccacaaaaagcagacgccgacgaccccactcccggcgcctctaacgatgcctcgacggaaacccgtccgggttcggggggcgaaccggccgcctgtcgctcgtcagggccggcgggcgctcctcgccgccctagaggctgtcccgctggtgtgacgttttcctcgtccgcgccccccgaccctcccatggatttaacaaacgggggggtgtcgcctgcggcgacctcggcgcctctggactggaccacgtttcggcgtgtgtttctgatcgacgacgcgtggcggcccctgatggagcctgagctggcgaaccccttaaccgcccacctcctggccgaatataatcgtcggtgccagaccgaagaggtgctgccgccgcgggaggatgtgttttcgtggactcgttattgcacccccgacgaggtgcgcgtggttatcatcggccaggacccatatcaccaccccggccaggcgcacggacttgcgtttagcgtgcgcgcgaacgtgccgcctcccccgagtcttcggaatgtcttggtggccgtcaagaactgttatcccgaggcacggatgagcggccacggttgcctggaaaagtgggcgcgggacggcgtcctgttactaaacacgaccctgaccgtcaagcgcggggcggcggcgtcccactctagaatcggttgggaccgcttcgtgggcggagttatccgccggttggccgcgcgccgccccggcctggtgtttatgctctggggcgcacacgcccagaatgccatcaggccggaccctcgggtccattgcgtcctcaagttttcgcacccgtcgcccctctccaaggttccgttcggaacctgccagcatttcctcgtggcgaaccgatacctcgagacccggtcgatttcacccatcgactggtcggtttgaaaggcatcgacgtccggggtttttgtcggtgggggcttttgggtatttccgatgaataaagacggttaatggttaaacctctggtctcatacgggtcggtgatgtcgggcgtcgggggagagggagttccctctgcgcttgcgattctagcctcgtggggctggacgttcgacacgccaaaccacgagtcggggatatcgccagatacgactcccgcagattccattcggggggccgctgtggcctcacctaaccaacctttacacgggggcccggaacgggaggccacagcgccgtctttctccccaacgcgcgcggatgacggcccgccctgtaccgacgggccctacgtgacgtttgataccctgtttatggtgtcgtcgatcgacgaattagggcgtcgccagctcacggacaccatccgcaaggacctgcggttgtcgctggccaagtttagcattgcgtgcaccaagacctcctcgttttcgggaaacgccccgcgccaccacagacgcggggcgttccagcgcggcacgcgggcgccgcgcagcaacaaaagcctccagatgtttgtgttgtgcaaacgcgcccacgccgctcgagtgcgagagcagcttcgggtcgttattcagtcccgcaagccgcgcaagtattacacgcgatcttcggacgggcggctctgccccgccgtccccgtgttcgtccacgagttcgtctcgtccgagccaatgcgcctccaccgagataacgtcatgctggcctcgggggccgagtaaccgccccccccccatgccaccctcactgcccgtcgcgcgtgtttgatgttaataaataacacataaatttggctggttgtttgttgtctttaatggaccgcccgcaaggggggggggggcgtttcagtgtcgggtgacgagcgcgatccggccgggatcctaggaccccaaaagtttgtctgcgtattccagggtggggctcagttgaatctcccgcagcacctctaccagcaggtccgcggtgggctggagaaactcggccgtcccggggcaggcggttgtcgggggtggaggcgcggcgcccaccccgtgtgccgcgcctggcgtctcctctgggggcgacccgtaaatggttgcagtgatgtaaatggtgtccgcggtccagaccacggtcaaaatgccggccgtggcgctccgggcgctttcgccgcgcgaggagctgacccaggagtcgaacggatacgcgtacatatgggcgtcccacccgcgttcgagcttctggttgctgtcccggcctataaagcggtaggcacaaaattcggcgcgacagtcgataatcaccaacagcccaatgggggtgtgctggataacaacgcctccgcgcggcaggcggtcctggcgctcccggccccgtaccatgatcgcgcgggtgccgtactcaaaaacatgcaccacctgcgcggcgtcgggcagtgcgctggtcagcgaggccctggcgtggcataggctatacgcgatggtcgtctgtggattggacatctcgcggtgggtagtgagtcccccgggccgggttcggtggaactgtaaggggacggcgggttaatagacaatgaccacgttcggatcgcgcagagccgatagtatgtgctcactaatgacgtcatcgcgctcgtggcgctcccggagcggatttaagttcatgcgaaggaattcggaggaggtggtgcgggacatggccacgtacgcgctgttgaggcgcaggttgccgggcgtaaagcagatggcgaccttgtccaggctaaggccctgggagcgcgtgatggtcatggcaagcttggagctgatgccgtagtcggcgtttatggccatggccagctccgtagagtcaatggactcgacaaactcgctgatgttggtgttgacgacggacatgaagccgtgttggtcccgcaagaccacgtaaggcaggggggcctcttccagtaactcggccacgttggccgtcgcgtgccgcctccgcagctcgtccgcaaaggcaaacacccgtgtgtacgtgtatcccatgagcgtataattgtccgtctgcagggcgacggacatcagccccccgcgcggcgagccggtcagcatctcgcagccccggaagataacgttgtccacgtacgtgctaaagggggcgacttcaaatgcctccccgaagagctcttggaggattcggaatctcccgaggaaggcccgcttcagcagcgcaaactgggtgtgaacggcggcggtggtctccggttccccgggggtgtagtggcagtaaaacacgtcgagctgttgttcgtccagccccgcgaaaataacgtcgaggtcgtcgtcgggaaaatcgtccgggcccccgtcccgcggccccagttgcttaaaatcaaacgcacgctcgccgggggcgcctgcgtcggccattaccgacgcctgcgtcggcacccccgaagatttggggcgcagagacagaatctccgccgttagttctcccatgcgggcgtacgcgagggtcctctgggtcgcatccaggcccgggcgctgcagaaagttgtaaaaggagataagcccgctaaatatgagccgcgacaggaacctgtaggcaaactccaccgaagtctccccctgagtctttacaaagctgtcgtcacgcaacactgcctcgaaggcccggaacgtcccactaaacccaaaaaccagttttcgcaggcgcgcggtcaccgcgatctggctgttgaggacgtaagtgacgtcgttgcgggccacgaccagctgctgtttgctgtgcacctcgcagcgcatgtgccccgcgtcctggtcctggctctgcgagtagttggtgatgcggctggcgttggccgtgagccacttttcaatagtcaggccgggctggtgtgtcagccgtcggtattcgtcaaactccttgaccgacacgaacgtaagcacggggagggtgaacacgacgaactccccctcacgggtcaccttcaggtaggcgtggagcttggccatgtacgcgctcacctctttgtgggaggagaacagccgcgtccagccggggaggttggcggggttggtgatgtagttttccgggacgacgaagcgatccacgaactgcatgtgctcctcggtgatgggcaggccgtactccagcaccttcatgaggttaccgaactcgtgctcgacgcaccgtttgttgttaataaaaatggcccagctatacgagaggcgggcgtactcgcgcagcgtgcggttgcagatgaggtacgtgagcacgttctcgctctggcggacggaacaccgcagtttctggtgctcgaaggtcgactccagggacgccgtctgcgtcggcgagcccacacacaccaacacgggccgcaggcgggccgcgtactggggggtgtggtacagggcgttaatcatccaccagcaatacaccacggccgtgaggaggtgacgcccaaggagcccggcctcgtcgatgacgatcacgttgctgcgggtaaaggccggcagcgccccgtgggtggccggggccaaccgcgtcagggcgccctcggccaaccccagggtccgttccagggcggccagggcgcgaaactcgttccgcaactcctcgcccccggaggcggccagggcgcgcttcgtgaggtccaaaatcacctcccagtagtacgtcagatctcgtcgctgcaggtcctccagcgaggcggggttgctggtcagggtgtacgggtactgtcccagttgggcctggacgtgattcccgcgaaacccaaattcatgaaagatggtgttgatgggtcggctgagaaaggcgcccgagagtttggcgtacatgttttgggccgcaatgcgcgtggcgcccgtcaccacacagtccaagacctcgttgattgtctgcacgcacgtgctctttccggagccagcgttgccggtgataagatacaccgcgaacggaaactccctgaggggcaggcctgcgggggactctaaggccgccacgtcccggaaccactgcagacggggcacttgcgctccgtcgagctgttgttgcgagagctctcggatgcgcttaaggattggctgcaccccgtgcatagacgtaaaatttaaaaaggcctcggccctccctggaacggctggtcggtccccgggttgctgaaggtgcggcgggccgggtttctgtccgtctagctggcgctccccgccggccgccgccatgaccgcaccacgctcgtgggcccccactacgcgtgcgcggggggacacggaagcgctgtgctcccccgaggacggctgggtaaaggttcaccccacccccggtacgatgctgttccgtgagattctccacgggcagctggggtataccgagggccagggggtgtacaacgtcgtccggtccagcgaggcgaccacccggcagctgcaggcggcgatctttcacgcgctcctcaacgccaccacttaccgggacctcgaggcggactggctcggccacgtggcggcccgcggtctgcagccccaacggctggttcgccggtacaggaacgcccgggaggcggatatcgccggggtggccgagcgggtgttcgacacgtggcggaacacgcttaggacgacgctgctggactttgcccacgggttggtcgcctgctttgcgccgggcggcccgagcggcccgtcaagcttccccaaatatatcgactggctgacgtgcctggggctggtccccatattacgcaagcgacaagaagggggtgtgacgcagggtctgagggcgtttctcaagcagcacccgctgacccgccagctggccacggtcgcggaggccgcggagcgcgccggccccgggttttttgagctggcgctggccttcgactccacgcgcgtggcggactacgaccgcgtgtatatctactacaaccaccgccggggcgactggctcgtgcgagaccccatcagcgggcagcgcggagaatgtctggtgctgtggccccccttgtggaccggggaccgtctggtcttcgattcgcccgtccagcggctgtttcccgagatcgtcgcgtgtcactccctccgggaacacgcgcacgtctgccggctgcgcaataccgcgtccgtcaaggtgctgctggggcgcaagagcgacagcgagcgcggggtggccggtgccgcgcgggtcgttaacaaggtgttgggggaggacgacgagaccaaggccgggtcggccgcctcgcgcctcgtgcggcttatcatcaacatgaagggcatgcgccacgtaggcgacattaacgacaccgtgcgtgcctacctcgacgaggccggggggcacctgatagacgccccggccgtcgacggtaccctccctggattcggcaagggcggaaacagccgcgggtctgcgggccaggaccagggggggcgggcgccgcagcttcgccaggccttccgcacggccgtggttaacaacatcaacggcgtgttggagggctatataaataacctgtttggaaccatcgagcgcctgcgcgagaccaacgcgggcctggcgacccaattgcaggagcgcgaccgcgagctccggcgcgcaacagcgggggccctggagcgccagcagcgcgcggccgacctggcggccgagtccgtgaccggtggatgcggcagccgccctgcgggggcggacctgctccgggccgactatgacattatcgacgtcagcaagtccatggacgacgacacgtacgtcgccaacagctttcagcacccgtacatcccttcgtacgcccaggacctggagcgcctgtcgcgcctctgggagcacgagctggtgcgctgttttaaaattctgtgtcaccgcaacaaccagggccaagagacgtcgatctcgtactccagcggggcgatcgccgcattcgtcgccccctactttgagtcagtgcttcgggccccccgggtaggcgcgcccatcacgggctccgatgtcatcctgggggaggaggagttatgggatgcggtgtttaagaaaacccgcctgcaaacgtacctgacagacatcgcggccctgttcgtcgcggacgtccagcacgcagcgctgcccccgcccccctccccggtcggcgccgatttccggcccggcgcgtccccgcggggccggtccagatcgcggtcgcccggaagaactgcgccaggcgcgccggaccagggcgggggcatcgggcaccgggatggccgccgcgacggccgacgatgaggggtcggccgccaccatcctcaagcaggccatcgccggggaccgcagcctggtcgaggcggccgaggcgattagccagcagacgctgctccgcctggcctgcgaggtgcgccaggtcggcgaccgccagccgcggtttaccgccaccagcatcgcgcgcgtcgacgtcgcgcctgggtgccggttgcggttcgttctggacgggagtcccgaggacgcctatgtgacgtcggaggattactttaagcgctgctgcggccagtccagttatcgcggcttcgcggtggcggtcctgacggccaacgaggaccacgtgcacagcctggccgtgccccccctcgttctgctgcaccggttctccctgttcaaccccagggacctcctggactttgagcttgcctgtctgctgatgtacctggagaactgcccccgaagccacgccaccccgtcgacctttgccaaggttctggcgtggctcggggtcgcgggtcgccgcacgtccccattcgaacgcgttcgctgccttttcctccgcagttgccactgggtcctaaacacactcatgttcatggtgcacgtaaaaccgttcgacgacgagttcgtcctgccccactggtacatggcccggtacctgctggccaacaacccgccccccgttctctcggccctgttctgtgccaccccgacgagctcctcattccggctgccggggccgcccccccgctccgactgcgtggcctataaccccgccgggatcatggggagctgctgggcgtcggaggaggtgcgcgcgcctctggtctattggtggctttcggagaccccaaaacgacagacgtcgtcgctgttttatcagttttgttgaattttaggaaataaacccggttttgtttctgtggcctcccgacggatgcgcgtgtccttcctccgtcttggtgggtgggtgtctgtgtatcgcgtcccatctgtgcggagagggggggcatgtcggcacgtattcggacagactcaagcacacacgggggagcgctcttgtctcagggcaatgtttttattggtcaaactcaggcaaacagaaacgacatcttgtcgtcaaagggatacacaaacttccccccctctccccatactcccgccagcaccccggtaaacaccaactcaatctcgcgcaggatttcgcgcaggtgatgagcgcagtccacgggggggagcacaaggggccgcgggtatagatcgacggggacgccgaccgactccccgcctccgggacagacacgcacgacgcgccgccagtagtgctctgcgtccagcaaggcgccgccgcggaaggcagtggggggcaaggggtcgctagcctcaaagggggacacccgaacgctccagtactccgcgtccaaccgtttattaaacgcgtccacgataaggcggtcgcaggcgtcctccataaggccccgggccgtgagtgcgtcctcctccggcacgcctgccgttgtcaggcccaggacccgtcgcagcgtgtcgcgtacgaccccggccgccgtggtgtacgcgggcccgcggagaggaaatcccccaagatggtcagtgttgtcgcgggagttccagaaccacactcccgcctggttccaggcgactgcgtgggtgtagacgccctcgagggccaggcacagtgggtgccgcagccggaggccgttggccctaagcacggctcccacggccgtctcgatggcccgccgggcgtcctcgatcaccccggaagccgcatccgcgtcttgggggtccacgttaaagacaccccagaacgcacccccatcgcccccgcagaccgcgaacttcaccgagctggccgtctcctcgatctgcaggcagacggcggccattaccccacccaggagctgccgcagcgcagggcaggcgtcgcacgtgtccgggaccaggcgctccaagacggccccggcccagggctctgagggagcggccaccaccagcgcgtccagtcttgctaggcccgtccggccgtgggggtccgccagcccgctccccccgaggtcggccagggccgccaggagctgggcgcgaagtccggggaagcaaaaccgcgccgtccagacgggcccgacggccgcgggcgggtctaacagttggatgattttagtggcgggatgccaccgcgccaccgcctcccgcaccgcgggcaggaggcatccggctgccgccgaggccacgccgggccaggctcgcggggggaggacgaccctggcccccaccgcgggccaggcccccaggagcgcggcgtaagcggccgcggccccgcgcaccaggtcccgtgccgactcggccgtggccggcacggtgaacgtgggccaacccggaaaccccaggacggcaaagtacgggacgggtcccccccggacctcaaactcgggccccagaaaggcaaagacgggggccagggccccgggggcggcgtggaccgtggtatgccactgccggaaaagggcgacgagcgccggcgcggagaacttctcgccggcgcttacaaagtagtcgtaatcgcggggcagcagcacccgtgccgtgactcgttgcgggtgcccgcgtggccgcaggcccacctcgcacacctcgaccaggtccccgaacgcgccctccttcttgatcggcggaaacgcaagagtctggtattcgcgcgcaaatagcgcggttccggtggtgatgttaacggtcagcgaagcggcggacgcgcactggggggtgtcgcgaatggccgccaggcgcgcccacgccagccgcgcgtcgggatgctcggcaacgcgcgccgccagggccatagggtcgatgtcaatgttggcctccgcgaccaggagagcggcgcgaggggcggcgggcgggccccacgacgctctctcaactttcaccaccagtcccgtgcgtgggtccgagccgatacgcagcggggcgaacagggccaccggcccggtctggcgctccagggccgccaggacgcacgcgtacagcgcccgccacagagtcgggttctccaggggctccagcggggaggcggccggcgtcgtcgcggcgcgggcggccgccacgacggcctggacggagacgtccgcggagccgtagaaatcccgcagctccgtcgcggtgacggagacctccgcaaagcgcgcgcgaccctcccctgcggcgttgcgacatacaaaatacaccagggcgtggaagtactcgcgagcgcgggggggcagccataccgcgtaaagggtaatggcgctgacgctctcctccacccacacgatatctgcggtgtccatcgcacggcccctaaggatcacgggcggtctgtgggtcccatgctgccgtgcctggccgggcccggtgggtcgcggaaaccggtgacggggggggggcggtttttggggttggggtgggggtgggaaacggcccgggtccgggggccaacttggcccctcggtgcgttccggcaacagcgccgccggtccgcggacgaccacgtaccgaacgagtgcggtcccgagacttatagggtgctaaagttcaccgccccctgcatcatgggccaggcctcggtggggagctccgacagcgccgcctccaggatgatgtcagcgttggggttggcgctggatgagtgcgtgcgcaaacagcgcccccacgcaggcacgcgtagcttgaagcgcgcgcccgcaaactcccgcttgtgggccataagcagggcgtacagctgcctgtgggtccggcaggcgctgtggtcgatgtggtgggcgtccaacaaccccacgattgtctgtttggtgaggtttttaacgcgccccgccccgggaaacgtctgcgtgcttttggccatctgcacgccaaacagttcgccccagattatcttgaacagcgccaccgcgtggtccgtctcgctaacggacccgcgcgggggacagccgcttagggcgtcggcgacgcgcttgacggcttcctccgagagcagaagtccgtcggttacgttacagtggcccagttcgaacaccagctgcatgtagcggtcgtagtggggggtcagtaggtccagcacgtcatcggggccgaaggtcctcccagatcccccggccgccgagtcccaatgcaggcgcgcggccatggtgctgcacaggcacaacagctcccagacgggggttacgttcagggtggggggcagggccacgagctccagctctccggtgacgttgatcgtggggatgacgcccgtggcgtagtggtcatagatccgccgaaatatggcgctgctgcgggtggccatgggaacgcggagacaggcctccagcaacgccaggtaaataaaccgcgtgcgtcccatcaggctgttgaggttgcgcatgagcgcgacaatttccgccggcgcgacatcggaccggaggtatttttcgacgaaaagacccacctcctccgtctcggcggcctgggccggcagcgacgcctcgggatcccggcaccgcagctcccgtagatcgcgctgggccctgagggcgtcgaaatgtacgccccgcaaaaacagacagaagtcctttggggtcagggtatcgtcgtgtccccagaagcgcacgcgtatgcagtttagggtcagcagcatgtgaaggatgttaaggctgtccgagagacacgccagcgtgcatctctcaaagtagtgtttgtaacggaatttgttgtagatgcgcgacccccgccccagcgacgtgtcgcatgccgacgcgtcacagcgccccttgaaccggcgacacagcaggtttgtgacctgggagaactgcgcgggccactggccgcaggaactgaccacgtgattaaggagcatgggcgtaaagacgggctccgagcgcgccccggagccgtccatgtaaatcagtagctcccccttgcggagggtgcgcacccgtcccagggactggtacacggacaccatgtccggtccgtagttcatgggttttacgtaggcgaacatgccatcaaagtgcaggggatcgaagctgaggcccacggttacgaccgtcgtgtatataaccacgcggtattggccccacgtggtcacgtccccgaggggggtgagcgagtgaagcaacagcacgcggtccgtaaactgacggcagaaccgggccacgatctccgcgaaggagaccgtcgacgaaaaaatgcagatgttatcgcccccgccaaggcgcgcttccagctccccaaagaacgtggccccccgggcgtccggagaggcgtccggagacgggccgctcggcggcccgggcgggcgcagggcagcctgcaggagctcggtccccagacgcgggagaaacaggcaccggcgcgccgaaaacccgggcatggcgtactcgccgaccaccacatgcacgtttttttcgccccggagaccgcacaggaagtccaccaactgcgcgttggcggttgcgtccatggcgatgatccgaggacaggtgcgcagcaggcgtagcattaacgcatccacgcggcccagttgctgcatcgttggcgaatagagctggcccagcgtcgacataacctcgtccagaacgaggacgtcgtagttgttcagaaggttggggcccacgcgatgaaggctttccacctggacgataagtcggtggaaggggcggtcgttcataatgtaattggtggatgagaagtaggtgacaaagtcgaccaggcctgactcagcgaaccgcgtcgccagggtctgggtaaaactccgacgacaggagacgacgagcacactcgtgtccggagagtggatcgcttcccgcagccagcggatcagcgcggtagtttttcccgaccccattggcgcgcggaccacagtcacgcacctggccgtcggggcgctcgcgttggggaaggtgacgggtccgtgctgctgccgctcgatcgttgttttcgggtgaacccggggcacccattcggccaaatcccccccgtacaacatccgcgctagcgatacgctcgacgtgtactgttcgcactcgtcgtccccaatgggacgcccggcccccagaggatctcccgactccgcgccccccacgaaaggcatgaccggggcgcggacggcgtggtgggtctggtgtgtgcaggtggcgacgtttgtggtctctgcggtctgcgtcacggggctcctcgtcctggcctctgtgttccgggcacggtttccctgcttttacgccacggcgagctcttatgccggggtgaactccacggccgaggtgcgcgggggtgtagccgtgcccctcaggttggacacgcagagccttgtgggcacttatgtaatcacggccgtgttgttgttggccgcggccgtgtatgccgtggtcggcgccgtgacctcccgctacgaccgcgccctggacgcgggccgccgtctggctgcggcccgcatggccatgccgcacgccacgctgatcgccggaaacgtctgctcttggttgctgcagatcaccgtcctgttgctggcccatcgcaccagccagctggcccacctggtttacgtcctgcactttgcgtgtctggtgtattttgcggcccatttttgcaccaggggggtcctgagcgggacgtatctgcgtcaggtgcacggcctgatggagccggccccgactcatcatcgcgtcgttggcccggctcgagccgtgctgacaaacgccttgctgttgggcgtcttcctgtgcacggccgacgccgcggtatccctgaataccatcgccgcgttcaactttaatttttcggccccgggcatgctcatatgcctgaccgtgctgttcgcccttctcgtcgtatcgctgttgttggtggtcgagggggtgttgtgtcactacgtgcgcgtgttggtgggcccccacctgggggccgtggccgccacgggcatcgtcggcctggcatgcgagcactattacaccaacggctactacgttgtggagacgcagtggccgggggcccagacgggagtccgcgtcgccctcgccctggtcgccgcctttgccctcggcatggccgtgctccgctgcacccgcgcctatctgtatcacaggcggcaccacaccaaattttttatgcgcatgcgcgacacgcgacaccgcgcacattccgccctcaagcgcgtacgcagttccatgcgcggatcgcgagacggccgccacaggcccgcacccggcagcccgcccgggattcccgaatatgcggaagacccctacgcgatctcatacggcggccagctcgaccggtacggagattccgacggggagccgatttacgacgaggtggcggacgaccaaaccgacgtattgtacgccaagatacaacacccgcggcacctgcccgacgacgagcccatctatgacaccgttggggggtacgaccccgagcccgccgaggaccccgtgtacagcaccgtccgccgttggtagctgtttggttccgttttaataaaccgtttgtgtttaacccgaccgtggtgtatgtctggtgtgtggcgtccgatcccgttactatcaccgttccccccaaaccccggcgattgtgggtttttttaaaaacgacacgcgtgcgaccgtatacagaacattgttgttttttattcgctatcggacatggggggtggaaactgggtggcggggcaggcgcctccgggggttcgccggtgagtgtggcgcgaggggggatccgacgaacgcaggcgctgtctccccggggcccgcgtaaccccgcgcatatccgggggcacgtagaaattaccttcctcttcggactcgatatccacgacgtcaaagtcgtgggcggtcagcgagacgacctccccgtcgtcggtgatgaggacgttgtttcggcagcagcagggccgggtcccggagaacgagaggcccatagctcggcgagcgtgtcgtcgaacgccaggcggctgcttcgctgtatggccttatagatctccggatcgatgcggacgggggtaatgatcagggcgatcggaacggcctggttcgggagaatggacgccttgctgggtcctgcggccccgagagccccggcgccgtcctccaggcggaacgttacgccctcctccgcgctagtgcggtgcctgccgataaacgtcaccagatgcgggtggggggggcagtcggggaagtggctgtcgagcacgtagccctgcaccaagatctgcttaaagttcgggtgacgggggttcgcgaagacgggctcgcggcgtaccagatccccggagctccaggacacgggggagatggtgtggcgtccgaggtcgggggcgccaaacagaagcacctccgagacaacgccgctatttaactccaccaaggcccgatccgcggcggagcaccgccttttttcgcccgaggcgtgggcctctgaccaggcctggtcttgcgtgacgagagcctcctccgggccggggacgcgcccgggcgcgaagtatcgcacgctgggtttcgggatcgaccggataaatgcccggaacgcctccggggaccggtgtgccatcaagtcctcgtacgcggaggccgtggggtcgctggggtccatggggtcgaaagcgtacttggcccggcatttgacctcgtaaaaggccaggggggtcttggggactggggccaagtagccgtgaatgtcccgaggacagacgagaatatccagggacgccccgaccatccccgtgtgaccgtccatgaggaccccacacgtatgcacgttctcttcggcgaggtcgccgggttcgtggaagataaagcgccgcgtgtcggcgccggcctcgccgccgtcgtccgcgcggcccacgcagtagcgaaacagcaggcttcgggccgtcggctcgttcacccgcccgaacatcaccgccgaagactgtacatccggccgcaggctggcgttgtgcttcagccactggggcgagaaacacggaccctgggggccccagcggagggtggatgcggtcgtgtggccccgccggagcagggcccatagctggcagtcggcctggttttgcgtggccgcctcgtaaaaccccatgaggggccggggcgccacggcgtccgcggcggccgggggcccgcggcgcgtcaggcgccataggtgccggccgagtccgcggtccaccatacccgcctcctcgaggaccacggccagggaacacagataatccaggcgggcccagaggggaccgatggccagaggggcgcggacgccgcgcagcaacccgcgcaggtggcgctcgaacgtctcggctagtatatgggagggcagcgcgttggggatcaccgacgccgaccacatagagtcaaggtccggggagtcgggatcggcgtccgggtcgcgggcgtgggtgcccccaggagatagcggaatgtctggggtcggaggccctgaggcgtcagaaagtgccggcgacgcggcccggggcttttcgtctgcggtgtcggtggcgtgctgatcacgtggggggttaacgggcgaatgggagctcgggtccacagctgacgtcgtctggggtggggggggcaggggacggaaggtggttgttagcggaagactgttagggcgggggcgcttgggggggctgtcggggccacgaggggtgtcctcggccagggcccaggaacgcttagtcacggtgcgtcccggcggacatgctgggcctcccgtggactccatttccgagacgacgtggggggagcggtggttgagcgcgccgccgggtgaacgctgattctcacgacagcgcgtgccgcgcgcacgggttggtgtgacacaggcgggacaccagcaccaggagaggcttaagctcgggaggcagcgccaccgacgacagtatcgccttgtgtgtgtgctggtaatttatacaccgatccgtaaacgcgcgccgaatcttgggattgcggaggtggcgccggatgccctctgggacgtcatacgccaggccgtgggtgttggtctcggccgagttgacaaacagggctgggtgcagcacgcggcgataggcgagcagggccagggcgaagtccagcgacagctggttgttgaaatactggtaaccgggaaaccgggtcacgggtacgcccaggctcggggcgacgtacacgctaaccaccaactccagcagcgtctggccaagggcgtacaggtcaaccgctaacccgacgtcgtgcttcaggcggtggttggtaaattcggcccgttcgttgttaaggtatttcaccaacagctccgggggctggttatacccgtgacccaccagggtgtgaaagttggctgtggttagggcggtgggcatgccaaacatccggggggacttgaggtccggctcctggaggcaaaactgcccccgggcgatcgtggagttggagttgagggtgacgaggctaaagtcggcgaggacggcccgccggagcgagacggcgtccgaccgcagcatgacgaggatgttggcgcacttgatatccaggtggctgatcccgcaggtggtgtttaaaaacacaacggcgcgggccagctccgtgaagcactggtggagggccgtcgagaccgaggggtttgttgtgcgcagggacgccagttggccgatatacttaccgaggtccatgtcgtacgcggggaacactatctgtcgttgttgcagcgagaacccgaggggcgcgatgaagccgcggatgttgtgggtgcggccggcgcgtagagcgcactccccgaccaacagggtcgcgatgagctcaacggcaaaccactccttttcctttatggtcttaacggcaagcttatgttcgcgaatcagttggacgtcgccgtatcccccagaccccccgaagcttcgggccccggggatctcgagggtcgtgtagtgtagggcggggttgatggcgaacacggggctgcatagcttgcggatgcgcgtgagggtaaggatgtgcgagggggacgaggggggtgcggttaacgccgcctgggatctgcgcaggggcgggcggttcagtttggccgccgtaccgggcgtctcgggggacgcgcggcgatgagacgagcggctcattcgccatcgggatagtcccgcgcgaagccgctcgcggaggccggatcggtggcgggacccgtgggaggagcgggagccggcggcgtcctggagagaggggccgctggggcgcccggaggccccgtgtgggttggagtgtatgtaggatgcgagccaatccttgaaggactgttggcgtgcaccttgggggctgaggttagctgccacatgaccagcaggtcgctgtctgcgggactcatccatccttcggccaggtcgccgtcttcccacagagaagcgttggtcgctgcttcctcgagttgctcctcctggtccgcaagacgatcgtccacggcgtccaggcgctcaccaagcgccggatcgaggtaccgtcggtgtgcggttagaaagtcacgacgcgccgcttgctcctccacgcgaattttaacacaggtcgcgcgctgtcgcatcatctctaagcgcgcgcgggactttagccgcgcctccaattccaagtgggccgcctttgcagccataaaggcgccaacaaaccgaggatcttgggtgctgacgccctcccggtgcagctgcagggtctggtccttgtaaatctcggctcggaggtgcgtctcggccaggcgtcggcgcagggccgcgtgggcggcatctcggtccattccgccaccctgcgggcgacccggggggtgctctgatagtctcgcgtgcccaaggcccgtgatcggggtacttcgccgccgcgacccgccacccggtgtgcgcgatgtttggtcagcagctggcgtccgacgtccagcagtacctggagcgcctcgagaaacagaggcaacttaaggtgggcgcggacgaggcgtcggcgggcctcacaatgggcggcgatgccctacgagtgccctttttagatttcgcgaccgcgacccccaagcgccaccagaccgtggtcccgggcgtcgggacgctccacgactgctgcgagcactcgccgctcttctcggccgtggcgcggcggctgctgtttaatagcctggtgccggcgcaactaaaggggcgtgatttcgggggcgaccacacggccaagctggaattcctggcccccgagttggtacgggcggtggcgcgactgcggtttaaggagtgcgcgccggcggacgtggtgcctcagcgtaacgcctactatagcgttctgaacacgtttcaggccctccaccgctccgaagcctttcgccagctggtgcactttgtgcgggactttgcccagctgcttaaaacctccttccgggcctccagcctcacggagaccacgggccccccaaaaaaacgggccaaggtggacgtggccacccacggccggacgtacggcacgctggagctgttccaaaaaatgatccttatgcacgccacctactttctggccgccgtgctcctcggggaccacgcggagcaggtcaacacgttcctgcgtctcgtgtttgagatccccctgtttagcgacgcggccgtgcgccacttccgccagcgcgccaccgtgtttctcgtcccccggcgccacggcaagacctggtttctagtgcccctcatcgcgctgtcgctggcctcctttcgggggatcaagatcggctacacggcgcacatccgcaaggcgaccgagccggtgtttgaggagatcgacgcctgcctgcggggctggttcggttcggcccgagtggaccacgttaaaggggaaaccatctccttctcgtttccggacgggtcgcgcagtaccatcgtgtttgcctccagccacaacacaaacgtaagtcctcttttctttcgcatggctctcccaaggggccccgggtcgacccgacccacacccacccacccacccacatacacacacaaccagacgcgggaggaaagtctgccccgtgggcactgatttttattcgggatcgcttgaggaggcccgggcaacggcccgggcaacggtggggcaactcgtagcaaataggcgactgatgtacgaagagaagacacacaggcgccacccggcgctggtcggggggatgttgtccgcgccgcaccgtcccccgacgacctcttgcagacggtccgtgatgcaaggacggcggggggcctgcagcagggtgaccgtatccacgggatggccaaagagaagcggacacaggctagcatccccctggaccgccagggtacactgggccatcttggcccacagacacggggcgacgcagggacaggactccgttacgacggaggagagccacagtgcgttggcggaatcgatgtggggcggcggggcgcaggactcgcagccccccgggtggttggtgatcctggccaggagccatcccagatggcgggccctgcttcccggtggacagagcgaccccaggtcgctgtccatggcccagcagtagatctggccgctggggaggtgccaccaggcccccgggcccaaggcgcaacacgcgcccggctccgggggggtcttcgcggggaccagatacgcgccatccagctcgccgaccactggctcctccgcgagctgttcggtggttgggtcgggggtttcctccgggggggtggccgcccgtatgcgggcgaacgtgagggtgcacaggagcggggtcagggggtgcgtcacgctccggaggtggacgatcgcgcagtagcggcgctcgcggttaaagaaaaagagggcaaagaaggtgttcgggggcaaccgcagcgccttggggcgcgtcagatacagaaaaatctcgcagaagagggcgcgcccggggtctgggttaggaagggccacctgacacagaggctcggtgaggaccgttagacaccgaaagatcttgagccgctcgtccgcccgaacgacgcgccacacaaagacggagttgacaatgcgcgcgatagagtcgacgtccgtccccaggtcgtcgactctgtcgcgcgtgccgcgagctccggcccgggaatccggccggggcaaggtccccgggggaccaggcggcgccaggggccgccggggtcccagctgcgccatgccgggggcggggggagggcaaaccccagaggcgggggccaacggcgcggggaggagtgggtgggcgaggtggccgggggaaggcgcccgctagcgagaacggccgttcccggacgacaccttgcgacaaaacctaaggacagcggcccgcgcgacggggtccgagaggctaaggtaggccgcgatgttaatggtgaacgcaaagccgccgggaaagacaactatgccacagaggcggcgattaaaccccaggcagaggtaggcgtagctttccccgggcaggtattgctcgcagaccctgcgtggggctgtggaggggacggcctccatgaagcgacatttactctgctcgcgtttactgacgtcaccatccatcgccacggcgattggacgattgttaagccgcagcgtgtctccgcttgtgctgtagtagtcaaaaacgtaatggccgtcggagtcggcaaagcgggccgggaggtcgtcgccgagcgggacgacccgccgcccccgaccgccccgtccccccaggtgtgccaggacggccagggcatacgcggtgtgaaaaaaggcgtcgggggcggtcccctcgacggcgcgcatcaggttctcgaggagaatggggaagcgcctggtcacctcccccagccacgcgcgttggtcggggccaaagtcatagcgcaggcgctgtgagattcgagggccgccctgaagcgcggcccggatggcctggcccagggcccggaggcacgccagatgtatgcgcgcagtaaaggcgacctcggcggcgatgtcaaagggcggcaggacggggcgcgggtggcgcaggggcacctcgagcgcgggaaagcggagcagcagctccgcctgcccagcgggagacagctggtgggggcgcacgacgcgttctgcggcgcaggcctcggtcagggccgtggccagcgccgaggacagcagcggagggcgggcgcgtcgcccgccccacgccacggagttctcgtaggagacgacgacgaagcgctgtttggttccgtagtggtggcgcaggaccacggagatagaacgacggctccacagccagtccggccggtcgccgccggccagggcttcccatccgcgatccaaccactcgaccagcgaccgcggctttgcggtaccaggggtcagggttagaacgtcgttcaggatgtcctcgcccccgggcccgtggggcactggggccacaaagcggcccccgcctgggggctccagacccgccaacaccgcatctgcgtcagccgcccccatggcgcccccgctgacggcctggtgaaccagggcgccctggcggagccccgatgcaacgccacaggccgcacgcccggtccgagcgcggaccgggtggcggcgggtgacgtcctgcactgcccgctgaaccaacgcgaggatctcctcgttctcctgcgcgatggacacgtcctgggccgcggtcgtgtcgccgccgggggccgtcagctgctcctccggggagatgggggggtcggacgccccgacgatgggcgggtctgcgggcgcccccgcgtggggccgggccaagggctgcggacgcggggacgcgctttcccccagacccatggacaggtgggccgcagcctccttcgcggccggcggggcggcggcgccaagcagagcgacgtagcggcacaaatgccgacagacgcgcatgatgcgcgtgctgtcggccgcgtagcgcgtgttgggggggacgagctcgtcgtaactaaacagaatcacgcgggcacagctcgcccccgagccccacgcaaggcgcagcgccgccacggcgtacgggtcatagacgccctgtgcgtcacacaccacgggcaaggagacgaacaaccccccggcgctggacgcacgcggaaggaggccagggtgtgccggcacgacgggggccagaagctcccccaccgcatccgcgggcacgtaggcggcaaacgccgtgcaccacggggtacagtcgccggtggcatgagcccgagtctggatttcgacctggaagtttgcggccgtcccgagtccggggcggccgcgcatcagggcggccagagggattcccgcggccgccaggcactcgctggatatgatgacgtgaaccaaagacgagggccgacccgggacgtggccgagatcgtactggacctcgttggccaagtgcgcgttcatggttcgggggtgggtgtgggtgtgtaggcgatgcgggtcccccgagtccgcgggaagggcgcgggtttggcgcgcgtatgcgtattcgccaacggaggcgtgcgtgcttatgcgcggcgcgtttcttctgtctccag

SEQ ID NO: 13 - DNA, 19199 bp, synthetic construct
  source 1..19199: mol_type = other DNA
ccagaccccgaaaacgggccccccccaaaacacaccccccgggggtcgcgcgcggccctttaaagcggcggcggcgggcagcccgggccccccgcggccgagactagcgagttagacaggcaagcactactcgcctctgcacgcacatgcttgcctgtcaaactctaccaccccggcacgctctctgtctccatggcccgccgccgccgccatcgcggcccccgccgcccccggccgcccgggcccacgggcgccgtcccaaccgcacagtcccaggtaacgactctaggaattaattcttgaagacgaaagggcctcgtgatacgcctatttttataggttaatgtcatgataataatggtttcttagggtcgaccggtcgaccggtcgaccggtcgaccaggtggcacttttcggggaaatgtgcgcggaacccctatttgtttatttttctaaatacattcaaatatgtatccgctcatgagacaataaccctgataaatgcttcaataatattgaaaaaggaagagtatgagtattcaacatttccgtgtcgcccttattcccttttttgcggcattttgccttcctgtttttgctcacccagaaacgctggtgaaagtaaaagatgctgaagatcagttgggtgcacgagtgggttacatcgaactggatctcaacagcggtaagatccttgagagttttcgccccgaagaacgttttccaatgatgagcacttttaaagttctgctatgtggcgcggtattatcccgtgttgacgccgggcaagagcaactcggtcgccgcatacactattctcagaatgacttggttgagtactcaccagtcacagaaaagcatcttacggatggcatgacagtaagagaattatgcagtgctgccataaccatgagtgataacactgcggccaacttacttctgacaacgatcggaggaccgaaggagctaaccgcttttttgcacaacatgggggatcatgtaactcgccttgatcgttgggaaccggagctgaatgaagccataccaaacgacgagcgtgacaccacgatgcctgcagcaatggcaacaacgttgcgcaaactattaactggcgaactacttactctagcttcccggcaacaattaatagactggatggaggcggataaagttgcaggaccacttctgcgctcggcccttccggctggctggtttattgctgataaatctggagccggtgagcgtgggtctcgcggtatcattgcagcactggggccagatggtaagccctcccgtatcgtagttatctacacgacggggagtcaggcaactatggatgaacgaaatagacagatcgctgagataggtgcctcactgattaagcattggtaactgtcagaccaagtttactcatatatactttagattgatttaaaacttcatttttaatttaaaaggatctaggtgaagatcctttttgataatctcatgaccaaaatcccttaacgtgagttttcgttccactgagcgtcagaccccgtagaaaagatcaaaggatcttcttgagatcctttttttctgcgcgtaatctgctgcttgcaaacaaaaaaaccaccgctaccagcggtggtttgtttgccggatcaagagctaccaactctttttccgaaggtaactggcttcagcagagcgcagataccaaatactgtccttctagtgtagccgtagttaggccaccacttcaagaactctgtagcaccgcctacatacctcgctctgctaatcctgttaccagtggctgctgccagtggcgataagtcgtgtcttaccgggttggactcaagacgatagttaccggataaggcgcagcggtcgggctgaacggggggttcgtgcacacagcccagcttggagcgaacgacctacaccgaactgagatacctacagcgtgagctatgagaaagcgccacgcttcccgaagggagaaaggcggacaggtatccggtaagcggcagggtcggaacaggagagcgcacgagggagcttccagggggaaacgcctggtatctttatagtcctgtcgggtttcgccacctctgacttgagcgtcgatttttgtgatgctcgtcaggggggcggagcctatggaaaaacgccagcaacgcggcctttttacggttcctggccttttgctggccttttgctcacatgttctttcctgcgttatcccctgattctgtggataaccgtattaccgcctttgagtgagctgataccgctcgccgcagccgaacgaccgagcgcagcgagtcagtgagcgaggaagcggaagagcgcctgatgcggtattttctccttacgcatctgtgcggtatttcacaccgcataggtcgaccggtcgaccggtcgaccggtcgaccggtcgaccatggtgcactctcagtacaatctgctctgatgccgcatagttaagccagtatacactccgctatcgctacgtgactgggtcatggctgcgccccgacacccgccaacacccgctgacgcgccctgacgggcttgtctgctcccggcatccgcttacagacaagctgtgaccgtctccgggagctgcatgtgtcagaggttttcaccgtcatcaccgaaacgcgcgaggcagcatgaattattccattatgcacgaccccgccccgacgccggcacgccgggggcccgtggccgcggcccgttggtcgaacccccggccccgcccatccgcgccatctgccatgggcggggcgcgagggcgggtgggtccgcgccccgccccgcatggcatctcattaccgcccgatccggcggtttccgcttccgttccgcatgctaacgaggaacaggcagggggcggggcccgggccccgacttcccggttcggcggtaatgagatacgagccccgcgcgcccgttggccgtccccgggccccccggtcccgcccgccggacgccgggaccaacgggacggcgggcggcccaagggccgcccgccttgccgcccccccattggccggcgggcgggaccgccccaagggggcggggccgccgggtaaaagaagtgagaacgcgaagcgttcgcacttcgtcccaatatatatatattattagggcgaagtgcgagcactggcgccgtgcccgactccgcgccggccccgggggcgggcccgggcggcggggggcgggtctctccggcgcacataaaggcccggcgcgaccgacgcccgcagacggcgccggccacgaacgacgggagcggctgcggagcacgcggaccgggagcgggagtcgcagagggccgtcggagcggacggcgtcggcatcgcgacgccccggctcgggatcgggatcgcatcggaaagggacacgcggacgcgggggggaaagacccgcccaccccacccacgaaacacaggggacgcaccccgggggcctccgacgacagaaacccaccggtccgccttttttgcacgggtaagcaccttgggtgggcggaggagggggggacgcgggggcggaggaggggggacgcgggggcggaggaggggggacgcgggggcggaggaggggggacgcgggggcggaggaggggggacgcgggggcggaggagggggctcacccgcgttcgtgccttcccgcaggaggaacgtcctcgtcgataagctgatccatcgccaccatggtgagcaagggcgaggagctgttcaccggggtggtgcccatcctggtcgagctggacggcgacgtaaacggccacaagttcagcgtgtccggcgagggcgagggcgatgccacctacggcaagctgaccctgaagttcatctgcaccaccggcaagctgcccgtgccctggcccaccctcgtgaccaccctgacctacggcgtgcagtgcttcagccgctaccccgaccacatgaagcagcacgacttcttcaagtccgccatgcccgaaggctacgtccaggagcgcaccatcttcttcaaggacgacggcaactacaagacccgcgccgaggtgaagttcgagggcgacaccctggtgaaccgcatcgagctgaagggcatcgacttcaaggaggacggcaacatcctggggcacaagctggagtacaactacaacagccacaacgtctatatcatggccgacaagcagaagaacggcatcaaggtgaacttcaagatccgccacaacatcgaggacggcagcgtgcagctcgccgaccactaccagcagaacacccccatcggcgacggccccgtgctgctgcccgacaaccactacctgagcacccagtccgccctgagcaaagaccccaacgagaagcgcgatcacatggtcctgctggagttcgtgaccgccgccgggatcactctcggcatggacgagctgtacaagtaaagcggccaacttgtttattgcagcttataatggttacaaataaagcaatagcatcacaaatttcacaaataaagcatttttttcactgcattctagttgtggtttgtccaaactcatcaatgtatcttatcatgtctggatcggtttgaagatctcccgatcccctatggtgcactctcagtacaatctgctctgatgccgcatagttaagccagtatctgctccctgcttgtgtgttggaggtcgctgagtagtgcgcgagcaaaatttaagctacaacaaggcaaggcttgaccgacaattgcatgaagaatctgcttagggttaggcgttttgcgctgcttcgcgatgtacgggccagatatacgcgttgacattgattattgactagtcaactttgtatagaaaagttgctcgacattgattattgactagttattaatagtaatcaattacggggtcattagttcatagcccatatatggagttccgcgttacataacttacggtaaatggcccgcctggctgaccgcccaacgacccccgcccattgacgtcaataatgacgtatgttcccatagtaacgccaatagggactttccattgacgtcaatgggtggagtatttacggtaaactgcccacttggcagtacatcaagtgtatcatatgccaagtacgccccctattgacgtcaatgacggtaaatggcccgcctggcattatgcccagtacatgaccttatgggactttcctacttggcagtacatctacgtattagtcatcgctattaccatggtcgaggtgagccccacgttctgcttcactctccccatctcccccccctccccacccccaattttgtatttatttattttttaattattttgtgcagcgatgggggcggggggggggggggggcgcgcgccaggcggggcggggcggggcgaggggcggggcggggcgaggcggagaggtgcggcggcagccaatcagagcggcgcgctccgaaagtttccttttatggcgaggcggcggcggcggcggccctataaaaagcgaagcgcgcggcgggcgggagtcgctgcgcgctgccttcgccccgtgccccgctccgccgccgcctcgcgccgcccgccccggctctgactgaccgcgttactcccacaggtgagcgggcgggacggcccttctcctccgggctgtaattagcgcttggtttaatgacggcttgtttcttttctgtggctgcgtgaaagccttgaggggctccgggagggccctttgtgcggggggagcggctcggggggtgcgtgcgtgtgtgtgtgcgtggggagcgccgcgtgcggctccgcgctgcccggcggctgtgagcgctgcgggcgcggcgcggggctttgtgcgctccgcagtgtgcgcgaggggagcgcggccgggggcggtgccccgcggtgcggggggggctgcgaggggaacaaaggctgcgtgcggggtgtgtgcgtgggggggtgagcagggggtgtgggcgcgtcggtcgggctgcaaccccccctgcacccccctccccgagttgctgagcacggcccggcttcgggtgcggggctccgtacggggcgtggcgcggggctcgccgtgccgggcggggggtggcggcaggtgggggtgccgggcggggcggggccgcctcgggccggggagggctcgggggaggggcgcggcggcccccggagcgccggcggctgtcgaggcgcggcgagccgcagccattgccttttatggtaatcgtgcgagagggcgcagggacttcctttgtcccaaatctgtgcggagccgaaatctgggaggcgccgccgcaccccctctagcgggcgcggggcgaagcggtgcggcgccggcaggaaggaaatgggcggggagggccttcgtgcgtcgccgcgccgccgtccccttctccctctccagcctcggggctgtccgcggggggacggctgccttcgggggggacggggcagggcggggttcggcttctggcgtgtgaccggcggctctagagcctctgctaaccatgttcatgccttcttctttttcctacagctcctgggcaacgtgctggttattgtgctgtctcatcattttggcaaagaattgcaagtttgtacaaaaaagcaggctctcgaggccaccatggaagacgccaaaaacataaagaaaggcccggcgccattctatccgctagaggatggaaccgctggagagcaactgcataaggctatgaagagatacgccctggttcctggaacaattgcttttacagatgcacatatcgaggtgaacatcacgtacgcggaatacttcgaaatgtccgttcggttggcagaagctatgaaacgatatgggctgaatacaaatcacagaatcgtcgtatgcagtgaaaactctcttcaattctttatgccggtgttgggcgcgttatttatcggagttgcagttgcgcccgcgaacgacatttataatgaacgtgaattgctcaacagtatgaacatttcgcagcctaccgtagtgtttgtttccaaaaaggggttgcaaaaaattttgaacgtgcaaaaaaaattaccaataatccagaaaattattatcatggattctaaaacggattaccagggatttcagtcgatgtacacgttcgtcacatctcatctacctcccggttttaatgaatacgattttgtaccagagtcctttgatcgtgacaaaacaattgcactgataatgaactcctctggatctactgggttacctaagggtgtggcccttccgcatagaactgcctgcgtcagattctcgcatgccagagatcctatttttggcaatcaaatcattccggatactgcgattttaagtgttgttccattccatcacggttttggaatgtttactacactcggatatttgatatgtggatttcgagtcgtcttaatgtatagatttgaagaagagctgtttttacgatcccttcaggattacaaaattcaaagtgcgttgctagtaccaaccctattttcattcttcgccaaaagcactctgattgacaaatacgatttatctaatttacacgaaattgcttctgggggcgcacctctttcgaaagaagtcggggaagcggttgcaaaacgcttccatcttccagggatacgacaaggatatgggctcactgagactacatcagctattctgattacacccgagggggatgataaaccgggcgcggtcggtaaagttgttccattttttgaagcgaaggttgtggatctggataccgggaaaacgctgggcgttaatcagagaggcgaattatgtgtcagaggacctatgattatgtccggttatgtaaacaatccggaagcgaccaacgccttgattgacaaggatggatggctacattctggagacatagcttactgggacgaagacgaacacttcttcatagttgaccgcttgaagtctttaattaaatacaaaggataccaggtggcccccgctgaattggagtcgatattgttacaacaccccaacatcttcgacgcgggcgtggcaggtcttcccgacgatgacgccggtgaacttcccgccgccgttgttgttttggagcacggaaagacgatgacggaaaaagagatcgtggattacgtcgccagtcaagtaacaaccgcgaaaaagttgcgcggaggagttgtgtttgtggacgaagtaccgaaaggtcttaccggaaaactcgacgcaagaaaaatcagagagatcctcataaaggccaagaagggcggaaagtccaaattggactacaaagacgatgacgacaagtaaacccagctttcttgtacaaagtgggaattcctagagctcgctgatcagcctcgactgtgccttctagttgccagccatctgttgtttgcccctcccccgtgccttccttgaccctggaaggtgccactcccactgtcctttcctaataaaatgaggaaattgcatcgcattgtctgagtaggtgtcattctattctggggggtggggtggggcaggacagcaagggggaggattgggaagagaatagcaggcatgctggggacactgcgtgtgcagatcctaggaacttttaaaagaaaaggggggattggggggtacagtgcaggggaaagaatagtagacataatagcaacagacatacaaactaaagaattacaaaaacaaattacaaaaattcaaaattttatcgatactacggtaatcagcggaggggtatggtgggtgtccttgtataccgcaaagaaaaagcagtggattgtgccgctggtctcacaggaggcgcggaccaggtaactccgcacggccacgcaagcggagtccgttttgctggtgtgcatggccgtttcggcctgccaggtggcgttgaggcagtaagggggggccacgtgggttatgtccggggcccgtaagaacaggttggtgaggggggtcgctgtcatagtgcaaaaggggggatgcgcccgggcgggaagctcctaagggcactatgacaccggccttggagcggggacggatttatacgttgggttagttccctccgcccacccaggccgtacgccgggcccacccccgccatctgccgtgacccacgccccgccggccatgagcaaagaaggacaacacgtggggcgatttgtttgaaatgttttgtttttattgtacctaaaacagggagttgcaataaaaatatttgccgtgcacgtacgggggggcgacgatgtgactggccgtcaactcgcagacacgactcgaacactcctggcggtgcgtgtctaggatttcgatcaggcccgccatgcaggccccggggaggtagaaatgcatcttctctccgaccccgacaccaagggtcgcgtagtcgatctccgcgacgccacgctcgacgcggttggcgagcctggccagaatgacaaacacgaaggatgcaatgtccttaatgtccgccagacgccgccgcgaacacagttcgtccaggccgcacaggcctcgcgccttcaggtagcactggagaaagggccgcaggcgcgtggcgaggttatccagcaccgccgcggccgtcccgataatggggtcctgggggcgcagcggcaggttgtggtggatgcacatcttgcaccacgccagcgtctcgtcggcggaggccagcgcctcgatgaaattttcttggcgcagcacgcagtcgcgcatggccttggcggtcgatgcggcccgaggattgccggcaaaagtgcgatagaggctcgggccgtgggcgaccaaggtttcccaggagacccgtctggtctcggcgtcaaagggccctccttggcccgccagcaccggggcccaggggctattcgcggcgggaaacggctgccccccaaaggggtcgtgcatgacctgtgcgctgcggccgaagctctcgctgatgcggtcgaccgccgcgcgctcggagatggagcgcaggaccaaccgcgtggtggcgtcgatggtgtcggcggcgggcgcctttcgctccggggccggggcgcgggggtccgcgggcgggggggcaatcgccagcgtcattagcggggggggtgcttggcgcacgctccgtgtccgcgggcctccgggtgggtcgggctgctcacttccgcgccacgcctcgccatggggggcgccggggccgtccgtccaccccgccccggggcggggtccccccgggttgcgattggttctgggggcacgccggcgggggtccgacaaaccatcggcggccccgggaccaccgcgaccccgacccctgcgacgcccacggcgtccgccgcgggcaggctgggctttggtcggtgggggttggaggcgggccaccttgcccccgtgccgctcgggggagcaagacggtcgccgggccccgaggcgcgaccacacactgtggggcgctggttgaggatcgttggggccctgccgctccgtcggacgaggcgtctgggtgctgggtacgccggggtcttctggacgagacgggcggaccgccgggcgagcggcgtcgagtatcggctccggtccgtcctctccgtgggggtcttccatgtcctcgtccgacgaggaacactccccgttgctgtccgattccaggtcgtcgcggcggctctccgccggctcgggggggtcctcgtccagatcgctgtcggagaggtccaggccgaggtcaattagcatatcaatgtcagtcgccatgaccgggctgtcggctgccgtcggggctggggtgtcggatatggcctctggtggtggcgcaccggtagcaagcgaccgggcccgaatcggggagaggcaccgaagcgtgaccgtggttggaacacggctgcacaccaccaccggccgggtggtggatgtccttatacccgtggtgccggggccggctctcccaaacccctcctagttccgccccccgggcggggcccccgccccacctccggcacagacaaggaccaatcagacaccataagtacgtggcatgtatttaattagcatatcacatacaccgttccgcttccgcggggacccgggcgggggtggatacgctggctgggttggtcttggtaacgggacggccaattgggacccatgggcggggtcgttgggatccgcggccatactagcggaacggaagcggaaaccgccggatcgggcggtaatgagatgccatgcggggcggggcgcggacccacccgccctcgcgccccgcccatggcagatggcgcggatgggcggggccgggggttcgaccaacgggccgcggccacgggcccccggcgtgccggcgtcggggcggggtcgtgcataatggaattccgttcggggtgggcccgccgggggggcggggggccggcggcctccgctgctcctccttcccgccggcccctgggactatatgagcccgaggacgccccgatcgtccacacggagcgcggctgccgacacggatccacgacccgacgcgggaccgccagagacagaccgtcagacgctcgccgcgccgggacgccgatacgcggacgaagcgcgggagggggatcggccgtccctgtcctttttcccacccaagcatcgaccggtccgcgctagttccgcgtcgacggcgggggtcgtcggggtccgtgggtctcgccccctccccccatcgagagtccgtaggtgacctaccgtgctacgtccgccgtcgcagccgtatccccggaggatcgccccgcatcggcgatggcgtcggagaacaagcagcgccccggctccccgggccccaccgacgggccgccgcccaccccgagcccagaccgcgacgagcggggggccctcgggtggggcgcggagacggaggagggcggggacgaccccgaccacgaccccgaccacccccacgacctcgacgacgcccggcgggacgggagggcccccgcggcgggcaccgacgccggcgaggacgccggggacgccgtctcgccgcgacagctggctctgctggcctccatggtagaggaggccgtccggacgatcccgacgcccgaccccgcggcctcgccgccccggacccccgcctttcgagccgacgacgatgacggggacgagtacgacgacgcagccgacgccgccggcgaccgggccccggcccggggccgcgaacgggaggccccgctacgcggcgcgtatccggaccccacggaccgcctgtcgccgcgcccgccggcccagccgccgcggagacgtcgtcacggccggtggcggccatcggcgtcatcgacctcgtcggactccgggtcctcgtcctcgtcgtccgcatcctcttcgtcctcgtcgtccgacgaggacgaggacgacgacggcaacgacgcggccgaccacgcacgcgaggcgcgggccgtcgggcggggtccgtcgagcgcggcgccggcagcccccgggcggacgccgcccccgcccgggccaccccccctctccgaggccgcgcccaagccccgggcggcggcgaggacccccgcggcctccgcgggccgcatcgagcgccgccgggcccgcgcggcggtggccggccgcgacgccacgggccgcttcacggccgggcagccccggcgggtcgagctggacgccgacgcgacctccggcgccttctacgcgcgctatcgcgacgggtacgtcagcggggagccgtggcccggcgccgggcccccgcccccggggcgggtgctgtacggcggcctgggcgacagccgcccgggcctctggggggcgcccgaggcggaggaggcgcgacgccggttcgaggcctcgggcgccccggcggccgtgtgggcgcccgagctgggcgacgccgcgcagcagtacgccctgatcacgcggctgctgtacaccccggacgcggaggccatggggtggctccagaacccgcgcgtggtccccggggacgtggcgctggaccaggcctgcttccggatctcgggcgccgcgcgcaacagcagctccttcatcaccggcagcgtggcgcgggccgtgccccacctgggctacgccatggcggccggccgcttcggctggggcctggcgcacgcggcggccgccgtggccatgagccgccgatacgaccgcgcgcagaagggcttcctgctgaccagcctgcgccgcgcctacgcgcccctgttggcgcgcgagaacgcggcgctgacgggggccgcggggagccccggcgccggcgcagatgacgagggggtcgccgccgtcgccgccgccgcaccgggcgagcgcgcggtgcccgccgggtacggcgccgcggggatcctcgccgccctggggcggctgtccgccgcgcccgcctcccccgcggggggcgacgaccccgacgccgcccgccacgccgacgccgacgacgacgccgggcgccgcgcccaggccggccgcgtggccgtcgagtgcctggccgcctgccgcgggatcctggaggcgctggccgagggcttcgacggcgacctggcggccgtcccggggctggccggggcccggcccgccagccccccgcggccggagggacccgcgggccccgcttccccgccgccgccgcacgccgacgcgccccgcctgcgcgcgtggctgcgcgagctgcggttcgtgcgcgacgcgctggtgctcatgcgcctgcgcggggacctgcgcgtggccggcggcagcgaggccgccgtggccgccgtgcgcgccgtgagcctggtcgccggggccctgggccccgcgctgccgcgggacccgcgcctgccgagctccgcggccgccgccgccgcggacctgctgtttgacaaccagagcctgcgccccctgctggcggcggcggccagcgcaccggacgccgccgacgcgctggcggccgccgccgcctccgccgcgccgcgggaggggcgcaagcgcaagagtcccggcccggcccggccgcccggaggcggcggcccgcgacccccgaagacgaagaagagcggcgcggacgcccccggctcggacgcccgcgcccccctccccgcgcccgcgcccccctccacgcccccggggcccgagcccgcccccgcccagcccgcggcgccccgggccgccgcggcgcaggcccgcccgcgccccgtggccgtgtcgcgccggcccgccgagggccccgaccccctgggcggctggcggcggcagcccccggggcccagccacacggcggcgcccgcggccgccgccctggaggcctactgctccccgcgcgccgtggccgagctcacggaccacccgctgttccccgtcccctggcgaccggccctcatgtttgacccgcgggccctggcctcgatcgccgcgcggtgcgccgggcccgcccccgccgcccaggccgcgtgcggcggcggcgacgacgacgataacccccacccccacggggccgccgggggccgcctctttggccccctgcgcgcctcgggcccgctgcgccgcatggcggcctggatgcgccagatccccgaccccgaggacgtgcgcgtggtggtgctgtactcgccgctgccgggcgaggacctggccggcggcggggcctcgggggggccgccggagtggtccgccgagcgcggcgggctgtcctgcctgctggcggccctggccaaccggctgtgcgggccggacacggccgcctgggcgggcaattggaccggcgcccccgacgtgtcggcgctgggcgcacagggcgtgctgctgctgtccacgcgggacctggccttcgccggggccgtggagtttctggggctgctcgccagcgccggcgaccggcggctcatcgtggtcaacaccgtgcgcgcctgcgactggcccgccgacgggcccgcggtgtcgcggcagcacgcctacctggcgtgcgagctgctgcccgccgtgcagtgcgccgtgcgctggccggcggcgcgggacctgcgccgcacggtgctggcctcgggccgcgtgttcggcccgggggtcttcgcgcgcgtggaggccgcgcacgcgcgcctgtaccccgacgcgccgccgctgcgcctgtgccgcggcggcaacgtgcgctaccgcgtgcgcacgcgcttcggcccggacacgccggtgcccatgtccccgcgcgagtaccgccgggccgtgctgccggcgctggacggccgggcggcggcctcggggaccaccgacgccatggcgcccggcgcgccggacttctgcgaggaggaggcccactcgcacgccgcctgcgcgcgctggggcctgggcgcgccgctgcggcccgtgtacgtggcgctggggcgcgaggcggtgcgcgccggcccggcccggtggcgcgggccgcggagggacttttgcgcccgcgccctgctggagcccgacgacgacgcccccccgctggtgctgcgcggcgacgacgacggcccgggggccctgccgccggcgccgcccgggattcgctgggcctcggccacgggccgcagcggcaccgtgctggcggcggcgggggccgtggaggtgctgggggcggaggcgggcttggccacgcccccgcggcgggaagttgtggactgggaaggcgcctgggacgaagacgacggcggcgcgttcgagggggacggggtgctgtaacgggccgggacggggcggggcgcttgtgagacccgaagacgcaataaacggcaacaacctgattaagttttgcagtagcgttgtttattcgaggggcgggagggggcgaggggcgggagggggcgaggggcgggagggggcgaggggcgggagggggcgaggggcgggagggggcgaggggcgggagggggcgaggggcgggagggggcgaggggcgggagggggcgaggggcgggagggggcgaggggcgggagggggcgaggggcgggagggggcgaggggcgggagggggcgaggggcgggagggggcgaggggcgggagggggcgaggggcgggagggggcgaggggcgggagggggcgaggggcgggagggggcgaggggcgggagggggcgaggggcgggagggggcgaggggcggtggtggtgcgcgggcgcccccggagggtttggatctctgacctgaatcagatccgcggccgcaaggatctgcgatcgctccggtgcccgtcagtgggcagagcgcacatcgcccacagtccccgagaagttggggggaggggtcggcaattgaacgggtgcctagagaaggtggcgcggggtaaactgggaaagtgatgtcgtgtactggctccgcctttttcccgagggtgggggagaaccgtatataagtgcagtagtcgccgtgaacgttctttttcgcaacgggtttgccgccagaacacagctgaagcttcgaggggctcgcatctctccttcacgcgcccgccgccctacctgaggccgccatccacgccggttgagtcgcgttctgccgcctcccgcctgtggtgcctcctgaactgcgtccgccgtctaggtaagtttaaagctcaggtcgagaccgggcctttgtccggcgctcccttggagcctacctagactcagccggctctccacgctttgcctgaccctgcttgctcaactctacgtctttgtttcgttttctgttctgcgccgttacagatccaagctgtgaccggcgcctacgcatggacctcttggtcgacgagctgtttgccgacatgaacgcggacggcgcttcgccaccgcccccccgcccggccgggggtcccaaaaacaccccggcggcccccccgctgtacgcaacggggcgcctgagccaggcccagctcatgccctccccacccatgcccgtcccccccgccgccctctttaaccgtctcctcgacgacttgggctttagcgcgggccccgcgctatgtaccatgctcgatacctggaacgaggatctgttttcggcgctaccgaccaacgccgacctgtaccgggagtgtaaattcctatcaacgctgcccagcgatgtggtggaatggggggacgcgtacgtccccgaacgcacccaaatcgacattcgcgcccacggcgacgtggccttccctacgcttccggccacccgcgacggcctcgggctctactacgaagcgctctctcgtttcttccacgccgagctacgggcgcgggaggagagctatcgaaccgtgttggccaacttctgctcggccctgtaccggtacctgcgcgccagcgtccggcagctgcaccgccaggcgcacatgcgcggacgcgatcgcgacctgggagaaatgctgcgcgccacgatcgcggacaggtactaccgagagaccgctcgtctggcgcgtgttttgtttttgcatttgtatctatttttgacccgcgagatcctatgggccgcgtacgccgagcagatgatgcggcccgacctgtttgactgcctctgttgcgacctggagagctggcgtcagttggcgggtctgttccagcccttcatgttcgtcaacggagcgctcaccgtccggggagtgccaatcgaggcccgccggctgcgggagctaaaccacattcgcgagcaccttaacctcccgctggtgcgcagcgcggctacggaggagccaggggcgccgttgacgacccctcccaccctgcatggcaaccaggcccgcgcctctgggtactttatggtgttgattcgggcgaagttggactcgtattccagcttcacgacctcgccctccgaggcggtcatgcgggaacacgcgtacagccgcgcgcgtacgaaaaacaattacgggtctaccatcgagggcctgctcgatctcccggacgacgacgcccccgaagaggcggggctggcggctccgcgcctgtcctttctccccgcgggacacacgcgcagactgtcgacggcccccccgaccgatgtcagcctgggggacgagctccacttagacggcgaggacgtggcgatggcgcatgccgacgcgctagacgatttcgatctggacatgttgggggacggggattccccgggtccgggatttaccccccacgactccgccccctacggcgctctggatatggccgacttcgagtttgagcagatgtttaccgatgcccttggaattgacgagtacggtgggtaattctagccagctgagcgccggtcgctaccattaccagttggtctggtgtcaaaaataataataaccgggcaggccatgtctgcccgtatttcgcgtaaggaaatccattatgtactatttaaaaaacacaaacttttggatgttcggtttattctttttcttttacttttttatcatgggagcctacttcccgtttttcccgatttggctacatgacatcaaccatatcagcaaaagtgatacgggtattatttttgccgctatttctctgttctcgctattattccaaccgctgtttggtctgctttctgacaaactcggaacttgtttattgcagcttataatggttacaaataaagcaatagcatcacaaatttcacaaataaagcatttttttcactgcattctagttgtggtttgtccaaactcatcaatgtatcttatcatgtctggatctctgacctgagattggcggcactgaggtagagatgcccgaacccccccgagggagcgcgggacgcggccggggagggctggggccggggagggctggggccggggagggctggggccggggagggctggggccggggagggctggggccggggagggctggggctggggaggggcggtggtgtgtagcaggagcggtgtgttgcgccggggtacgtctggaggagcgggaggtgcgcggtgacgtgtggatgaggaacaggagttgttgcgcggtgagttgtcgctgtgagttgtgttgttgggcaggtgtggtggatgacgtgacgtgtgacgtgcggagtgcgccgtgctctgttggtttcacctgtggcagcccgggccccccgcgggcgcgcgcgcgcgcaaaaaaggcgggcggcggtccgggcggcgtgcgcgcgcgcggcgggcgtggggggcggggccgcgggagcggggggaggagcggggggaggagcggggggaggagcggggggaggagcggggggaggagcggggggaggagcggggggaggagcggggggaggagcggggggaggagcggggggaggagcggggggaggagcgg

SEQ ID NO: 14 - DNA, 17200 bp, synthetic construct
  source 1..17200: mol_type = other DNA
ccagaccccgaaaacgggccccccccaaaacacaccccccgggggtcgcgcgcggccctttaaagcggcggcggcgggcagcccgggccccccgcggccgagactagcgagttagacaggcaagcactactcgcctctgcacgcacatgcttgcctgtcaaactctaccaccccggcacgctctctgtctccatggcccgccgccgccgccatcgcggcccccgccgcccccggccgcccgggcccacgggcgccgtcccaaccgcacagtcccaggtaacgactctaggaattaattcttgaagacgaaagggcctcgtgatacgcctatttttataggttaatgtcatgataataatggtttcttagggtcgaccggtcgaccggtcgaccggtcgaccaggtggcacttttcggggaaatgtgcgcggaacccctatttgtttatttttctaaatacattcaaatatgtatccgctcatgagacaataaccctgataaatgcttcaataatattgaaaaaggaagagtatgagtattcaacatttccgtgtcgcccttattcccttttttgcggcattttgccttcctgtttttgctcacccagaaacgctggtgaaagtaaaagatgctgaagatcagttgggtgcacgagtgggttacatcgaactggatctcaacagcggtaagatccttgagagttttcgccccgaagaacgttttccaatgatgagcacttttaaagttctgctatgtggcgcggtattatcccgtgttgacgccgggcaagagcaactcggtcgccgcatacactattctcagaatgacttggttgagtactcaccagtcacagaaaagcatcttacggatggcatgacagtaagagaattatgcagtgctgccataaccatgagtgataacactgcggccaacttacttctgacaacgatcggaggaccgaaggagctaaccgcttttttgcacaacatgggggatcatgtaactcgccttgatcgttgggaaccggagctgaatgaagccataccaaacgacgagcgtgacaccacgatgcctgcagcaatggcaacaacgttgcgcaaactattaactggcgaactacttactctagcttcccggcaacaattaatagactggatggaggcggataaagttgcaggaccacttctgcgctcggcccttccggctggctggtttattgctgataaatctggagccggtgagcgtgggtctcgcggtatcattgcagcactggggccagatggtaagccctcccgtatcgtagttatctacacgacggggagtcaggcaactatggatgaacgaaatagacagatcgctgagataggtgcctcactgattaagcattggtaactgtcagaccaagtttactcatatatactttagattgatttaaaacttcatttttaatttaaaaggatctaggtgaagatcctttttgataatctcatgaccaaaatcccttaacgtgagttttcgttccactgagcgtcagaccccgtagaaaagatcaaaggatcttcttgagatcctttttttctgcgcgtaatctgctgcttgcaaacaaaaaaaccaccgctaccagcggtggtttgtttgccggatcaagagctaccaactctttttccgaaggtaactggcttcagcagagcgcagataccaaatactgtccttctagtgtagccgtagttaggccaccacttcaagaactctgtagcaccgcctacatacctcgctctgctaatcctgttaccagtggctgctgccagtggcgataagtcgtgtcttaccgggttggactcaagacgatagttaccggataaggcgcagcggtcgggctgaacggggggttcgtgcacacagcccagcttggagcgaacgacctacaccgaactgagatacctacagcgtgagctatgagaaagcgccacgcttcccgaagggagaaaggcggacaggtatccggtaagcggcagggtcggaacaggagagcgcacgagggagcttccagggggaaacgcctggtatctttatagtcctgtcgggtttcgccacctctgacttgagcgtcgatttttgtgatgctcgtcaggggggcggagcctatggaaaaacgccagcaacgcggcctttttacggttcctggccttttgctggccttttgctcacatgttctttcctgcgttatcccctgattctgtggataaccgtattaccgcctttgagtgagctgataccgctcgccgcagccgaacgaccgagcgcagcgagtcagtgagcgaggaagcggaagagcgcctgatgcggtattttctccttacgcatctgtgcggtatttcacaccgcataggtcgaccggtcgaccggtcgaccggtcgaccggtcgaccatggtgcactctcagtacaatctgctctgatgccgcatagttaagccagtatacactccgctatcgctacgtgactgggtcatggctgcgccccgacacccgccaacacccgctgacgcgccctgacgggcttgtctgctcccggcatccgcttacagacaagctgtgaccgtctccgggagctgcatgtgtcagaggttttcaccgtcatcaccgaaacgcgcgaggcagcatgaattattccattatgcacgaccccgccccgacgccggcacgccgggggcccgtggccgcggcccgttggtcgaacccccggccccgcccatccgcgccatctgccatgggcggggcgcgagggcgggtgggtccgcgccccgccccgcatggcatctcattaccgcccgatccggcggtttccgcttccgttccgcatgctaacgaggaacaggcagggggcggggcccgggccccgacttcccggttcggcggtaatgagatacgagccccgcgcgcccgttggccgtccccgggccccccggtcccgcccgccggacgccgggaccaacgggacggcgggcggcccaagggccgcccgccttgccgcccccccattggccggcgggcgggaccgccccaagggggcggggccgccgggtaaaagaagtgagaacgcgaagcgttcgcacttcgtcccaatatatatatattattagggcgaagtgcgagcactggcgccgtgcccgactccgcgccggccccgggggcgggcccgggcggcggggggcgggtctctccggcgcacataaaggcccggcgcgaccgacgcccgcagacggcgccggccacgaacgacgggagcggctgcggagcacgcggaccgggagcgggagtcgcagagggccgtcggagcggacggcgtcggcatcgcgacgccccggctcgggatcgggatcgcatcggaaagggacacgcggacgcgggggggaaagacccgcccaccccacccacgaaacacaggggacgcaccccgggggcctccgacgacagaaacccaccggtccgccttttttgcacgggtaagcaccttgggtgggcggaggagggggggacgcgggggcggaggaggggggacgcgggggcggaggaggggggacgcgggggcggaggaggggggacgcgggggcggaggaggggggacgcgggggcggaggagggggctcacccgcgttcgtgccttcccgcaggaggaacgtcctcgtcgataagctgatccatcgccaccatggtgagcaagggcgaggagctgttcaccggggtggtgcccatcctggtcgagctggacggcgacgtaaacggccacaagttcagcgtgtccggcgagggcgagggcgatgccacctacggcaagctgaccctgaagttcatctgcaccaccggcaagctgcccgtgccctggcccaccctcgtgaccaccctgacctacggcgtgcagtgcttcagccgctaccccgaccacatgaagcagcacgacttcttcaagtccgccatgcccgaaggctacgtccaggagcgcaccatcttcttcaaggacgacggcaactacaagacccgcgccgaggtgaagttcgagggcgacaccctggtgaaccgcatcgagctgaagggcatcgacttcaaggaggacggcaacatcctggggcacaagctggagtacaactacaacagccacaacgtctatatcatggccgacaagcagaagaacggcatcaaggtgaacttcaagatccgccacaacatcgaggacggcagcgtgcagctcgccgaccactaccagcagaacacccccatcggcgacggccccgtgctgctgcccgacaaccactacctgagcacccagtccgccctgagcaaagaccccaacgagaagcgcgatcacatggtcctgctggagttcgtgaccgccgccgggatcactctcggcatggacgagctgtacaagtaaagcggccaacttgtttattgcagcttataatggttacaaataaagcaatagcatcacaaatttcacaaataaagcatttttttcactgcattctagttgtggtttgtccaaactcatcaatgtatcttatcatgtctggatcggtttgaagatctcccgatcccctatggtgcactctcagtacaatctgctctgatgccgcatagttaagccagtatctgctccctgcttgtgtgttggaggtcgctgagtagtgcgcgagcaaaatttaagctacaacaaggcaaggcttgaccgacaattgcatgaagaatctgcttagggttaggcgttttgcgctgcttcgcgatgtacgggccagatatacgcgttgacattgattattgactagtcaactttgtatagaaaagttgctcgacattgattattgactagttattaatagtaatcaattacggggtcattagttcatagcccatatatggagttccgcgttacataacttacggtaaatggcccgcctggctgaccgcccaacgacccccgcccattgacgtcaataatgacgtatgttcccatagtaacgccaatagggactttccattgacgtcaatgggtggagtatttacggtaaactgcccacttggcagtacatcaagtgtatcatatgccaagtacgccccctattgacgtcaatgacggtaaatggcccgcctggcattatgcccagtacatgaccttatgggactttcctacttggcagtacatctacgtattagtcatcgctattaccatggtcgaggtgagccccacgttctgcttcactctccccatctcccccccctccccacccccaattttgtatttatttattttttaattattttgtgcagcgatgggggcggggggggggggggggcgcgcgccaggcggggcggggcggggcgaggggcggggcggggcgaggcggagaggtgcggcggcagccaatcagagcggcgcgctccgaaagtttccttttatggcgaggcggcggcggcggcggccctataaaaagcgaagcgcgcggcgggcgggagtcgctgcgcgctgccttcgccccgtgccccgctccgccgccgcctcgcgccgcccgccccggctctgactgaccgcgttactcccacaggtgagcgggcgggacggcccttctcctccgggctgtaattagcgcttggtttaatgacggcttgtttcttttctgtggctgcgtgaaagccttgaggggctccgggagggccctttgtgcggggggagcggctcggggggtgcgtgcgtgtgtgtgtgcgtggggagcgccgcgtgcggctccgcgctgcccggcggctgtgagcgctgcgggcgcggcgcggggctttgtgcgctccgcagtgtgcgcgaggggagcgcggccgggggcggtgccccgcggtgcggggggggctgcgaggggaacaaaggctgcgtgcggggtgtgtgcgtgggggggtgagcagggggtgtgggcgcgtcggtcgggctgcaaccccccctgcacccccctccccgagttgctgagcacggcccggcttcgggtgcggggctccgtacggggcgtggcgcggggctcgccgtgccgggcggggggtggcggcaggtgggggtgccgggcggggcggggccgcctcgggccggggagggctcgggggaggggcgcggcggcccccggagcgccggcggctgtcgaggcgcggcgagccgcagccattgccttttatggtaatcgtgcgagagggcgcagggacttcctttgtcccaaatctgtgcggagccgaaatctgggaggcgccgccgcaccccctctagcgggcgcggggcgaagcggtgcggcgccggcaggaaggaaatgggcggggagggccttcgtgcgtcgccgcgccgccgtccccttctccctctccagcctcggggctgtccgcggggggacggctgccttcgggggggacggggcagggcggggttcggcttctggcgtgtgaccggcggctctagagcctctgctaaccatgttcatgccttcttctttttcctacagctcctgggcaacgtgctggttattgtgctgtctcatcattttggcaaagaattgcaagtttgtacaaaaaagcaggctctcgaggccaccatggaagacgccaaaaacataaagaaaggcccggcgccattctatccgctagaggatggaaccgctggagagcaactgcataaggctatgaagagatacgccctggttcctggaacaattgcttttacagatgcacatatcgaggtgaacatcacgtacgcggaatacttcgaaatgtccgttcggttggcagaagctatgaaacgatatgggctgaatacaaatcacagaatcgtcgtatgcagtgaaaactctcttcaattctttatgccggtgttgggcgcgttatttatcggagttgcagttgcgcccgcgaacgacatttataatgaacgtgaattgctcaacagtatgaacatttcgcagcctaccgtagtgtttgtttccaaaaaggggttgcaaaaaattttgaacgtgcaaaaaaaattaccaataatccagaaaattattatcatggattctaaaacggattaccagggatttcagtcgatgtacacgttcgtcacatctcatctacctcccggttttaatgaatacgattttgtaccagagtcctttgatcgtgacaaaacaattgcactgataatgaactcctctggatctactgggttacctaagggtgtggcccttccgcatagaactgcctgcgtcagattctcgcatgccagagatcctatttttggcaatcaaatcattccggatactgcgattttaagtgttgttccattccatcacggttttggaatgtttactacactcggatatttgatatgtggatttcgagtcgtcttaatgtatagatttgaagaagagctgtttttacgatcccttcaggattacaaaattcaaagtgcgttgctagtaccaaccctattttcattcttcgccaaaagcactctgattgacaaatacgatttatctaatttacacgaaattgcttctgggggcgcacctctttcgaaagaagtcggggaagcggttgcaaaacgcttccatcttccagggatacgacaaggatatgggctcactgagactacatcagctattctgattacacccgagggggatgataaaccgggcgcggtcggtaaagttgttccattttttgaagcgaaggttgtggatctggataccgggaaaacgctgggcgttaatcagagaggcgaattatgtgtcagaggacctatgattatgtccggttatgtaaacaatccggaagcgaccaacgccttgattgacaaggatggatggctacattctggagacatagcttactgggacgaagacgaacacttcttcatagttgaccgcttgaagtctttaattaaatacaaaggataccaggtggcccccgctgaattggagtcgatattgttacaacaccccaacatcttcgacgcgggcgtggcaggtcttcccgacgatgacgccggtgaacttcccgccgccgttgttgttttggagcacggaaagacgatgacggaaaaagagatcgtggattacgtcgccagtcaagtaacaaccgcgaaaaagttgcgcggaggagttgtgtttgtggacgaagtaccgaaaggtcttaccggaaaactcgacgcaagaaaaatcagagagatcctcataaaggccaagaagggcggaaagtccaaattggactacaaagacgatgacgacaagtaaacccagctttcttgtacaaagtgggaattcctagagctcgctgatcagcctcgactgtgccttctagttgccagccatctgttgtttgcccctcccccgtgccttccttgaccctggaaggtgccactcccactgtcctttcctaataaaatgaggaaattgcatcgcattgtctgagtaggtgtcattctattctggggggtggggtggggcaggacagcaagggggaggattgggaagagaatagcaggcatgctggggacactgcgtgtgcagatcctaggaacttttaaaagaaaaggggggattggggggtacagtgcaggggaaagaatagtagacataatagcaacagacatacaaactaaagaattacaaaaacaaattacaaaaattcaaaattttatcgatactacggtaatcagcggaggggtatggtgggtgtccttgtataccgcaaagaaaaagcagtggattgtgccgctggtctcacaggaggcgcggaccaggtaactccgcacggccacgcaagcggagtccgttttgctggtgtgcatggccgtttcggcctgccaggtggcgttgaggcagtaagggggggccacgtgggttatgtccggggcccgtaagaacaggttggtgaggggggtcgctgtcatagtgcaaaaggggggatgcgcccgggcgggaagctcctaagggcactatgacaccggccttggagcggggacggatttatacgttgggttagttccctccgcccacccaggccgtacgccgggcccacccccgccatctgccgtgacccacgccccgccggccatgagcaaagaaggacaacacgtggggcgatttgtttgaaatgttttgtttttattgtacctaaaacagggagttgcaataaaaatatttgccgtgcacgtacgggggggcgacgatgtgactggccgtcaactcgcagacacgactcgaacactcctggcggtgcgtgtctaggatttcgatcaggcccgccatgcaggccccggggaggtagaaatgcatcttctctccgaccccgacaccaagggtcgcgtagtcgatctccgcgacgccacgctcgacgcggttggcgagcctggccagaatgacaaacacgaaggatgcaatgtccttaatgtccgccagacgccgccgcgaacacagttcgtccaggccgcacaggcctcgcgccttcaggtagcactggagaaagggccgcaggcgcgtggcgaggttatccagcaccgccgcggccgtcccgataatggggtcctgggggcgcagcggcaggttgtggtggatgcacatcttgcaccacgccagcgtctcgtcggcggaggccagcgcctcgatgaaattttcttggcgcagcacgcagtcgcgcatggccttggcggtcgatgcggcccgaggattgccggcaaaagtgcgatagaggctcgggccgtgggcgaccaaggtttcccaggagacccgtctggtctcggcgtcaaagggccctccttggcccgccagcaccggggcccaggggctattcgcggcgggaaacggctgccccccaaaggggtcgtgcatgacctgtgcgctgcggccgaagctctcgctgatgcggtcgaccgccgcgcgctcggagatggagcgcaggaccaaccgcgtggtggcgtcgatggtgtcggcggcgggcgcctttcgctccggggccggggcgcgggggtccgcgggcgggggggcaatcgccagcgtcattagcggggggggtgcttggcgcacgctccgtgtccgcgggcctccgggtgggtcgggctgctcacttccgcgccacgcctcgccatggggggcgccggggccgtccgtccaccccgccccggggcggggtccccccgggttgcgattggttctgggggcacgccggcgggggtccgacaaaccatcggcggccccgggaccaccgcgaccccgacccctgcgacgcccacggcgtccgccgcgggcaggctgggctttggtcggtgggggttggaggcgggccaccttgcccccgtgccgctcgggggagcaagacggtcgccgggccccgaggcgcgaccacacactgtggggcgctggttgaggatcgttggggccctgccgctccgtcggacgaggcgtctgggtgctgggtacgccggggtcttctggacgagacgggcggaccgccgggcgagcggcgtcgagtatcggctccggtccgtcctctccgtgggggtcttccatgtcctcgtccgacgaggaacactccccgttgctgtccgattccaggtcgtcgcggcggctctccgccggctcgggggggtcctcgtccagatcgctgtcggagaggtccaggccgaggtcaattagcatatcaatgtcagtcgccatgaccgggctgtcggctgccgtcggggctggggtgtcggatatggcctctggtggtggcgcaccggtagcaagcgaccgggcccgaatcggggagaggcaccgaagcgtgaccgtggttggaacacggctgcacaccaccaccggccgggtggtggatgtccttatacccgtggtgccggggccggctctcccaaacccctcctagttccgccccccgggcggggcccccgccccacctccggcacagacaaggaccaatcagacaccataagtacgtggcatgtatttaattagcatatcacatacaccgttccgcttccgcggggacccgggcgggggtggatacgctggctgggttggtcttggtaacgggacggccaattgggacccatgggcggggtcgttgggatccgcggccatactagcggaacggaagcggaaaccgccggatcgggcggtaatgagatgccatgcggggcggggcgcggacccacccgccctcgcgccccgcccatggcagatggcgcggatgggcggggccgggggttcgaccaacgggccgcggccacgggcccccggcgtgccggcgtcggggcggggtcgtgcataatggaattccgttcggggtgggcccgccgggggggcggggggccggcggcctccgctgctcctccttcccgccggcccctgggactatatgagcccgaggacgccccgatcgtccacacggagcgcggctgccgacacggatccacgacccgacgcgggaccgccagagacagaccgtcagacgctcgccgcgccgggacgccgatacgcggacgaagcgcgggagggggatcggccgtccctgtcctttttcccacccaagcatcgaccggtccgcgctagttccgcgtcgacggcgggggtcgtcggggtccgtgggtctcgccccctccccccatcgagagtccgtaggtgacctaccgtgctacgtccgccgtcgcagccgtatccccggaggatcgccccgcatcggcgatggcgtcggagaacaagcagcgccccggctccccgggccccaccgacgggccgccgcccaccccgagcccagaccgcgacgagcggggggccctcgggtggggcgcggagacggaggagggcggggacgaccccgaccacgaccccgaccacccccacgacctcgacgacgcccggcgggacgggagggcccccgcggcgggcaccgacgccggcgaggacgccggggacgccgtctcgccgcgacagctggctctgctggcctccatggtagaggaggccgtccggacgatcccgacgcccgaccccgcggcctcgccgccccggacccccgcctttcgagccgacgacgatgacggggacgagtacgacgacgcagccgacgccgccggcgaccgggccccggcccggggccgcgaacgggaggccccgctacgcggcgcgtatccggaccccacggaccgcctgtcgccgcgcccgccggcccagccgccgcggagacgtcgtcacggccggtggcggccatcggcgtcatcgacctcgtcggactccgggtcctcgtcctcgtcgtccgcatcctcttcgtcctcgtcgtccgacgaggacgaggacgacgacggcaacgacgcggccgaccacgcacgcgaggcgcgggccgtcgggcggggtccgtcgagcgcggcgccggcagcccccgggcggacgccgcccccgcccgggccaccccccctctccgaggccgcgcccaagccccgggcggcggcgaggacccccgcggcctccgcgggccgcatcgagcgccgccgggcccgcgcggcggtggccggccgcgacgccacgggccgcttcacggccgggcagccccggcgggtcgagctggacgccgacgcgacctccggcgccttctacgcgcgctatcgcgacgggtacgtcagcggggagccgtggcccggcgccgggcccccgcccccggggcgggtgctgtacggcggcctgggcgacagccgcccgggcctctggggggcgcccgaggcggaggaggcgcgacgccggttcgaggcctcgggcgccccggcggccgtgtgggcgcccgagctgggcgacgccgcgcagcagtacgccctgatcacgcggctgctgtacaccccggacgcggaggccatggggtggctccagaacccgcgcgtggtccccggggacgtggcgctggaccaggcctgcttccggatctcgggcgccgcgcgcaacagcagctccttcatcaccggcagcgtggcgcgggccgtgccccacctgggctacgccatggcggccggccgcttcggctggggcctggcgcacgcggcggccgccgtggccatgagccgccgatacgaccgcgcgcagaagggcttcctgctgaccagcctgcgccgcgcctacgcgcccctgttggcgcgcgagaacgcggcgctgacgggggccgcggggagccccggcgccggcgcagatgacgagggggtcgccgccgtcgccgccgccgcaccgggcgagcgcgcggtgcccgccgggtacggcgccgcggggatcctcgccgccctggggcggctgtccgccgcgcccgcctcccccgcggggggcgacgaccccgacgccgcccgccacgccgacgccgacgacgacgccgggcgccgcgcccaggccggccgcgtggccgtcgagtgcctggccgcctgccgcgggatcctggaggcgctggccgagggcttcgacggcgacctggcggccgtcccggggctggccggggcccggcccgccagccccccgcggccggagggacccgcgggccccgcttccccgccgccgccgcacgccgacgcgccccgcctgcgcgcgtggctgcgcgagctgcggttcgtgcgcgacgcgctggtgctcatgcgcctgcgcggggacctgcgcgtggccggcggcagcgaggccgccgtggccgccgtgcgcgccgtgagcctggtcgccggggccctgggccccgcgctgccgcgggacccgcgcctgccgagctccgcggccgccgccgccgcggacctgctgtttgacaaccagagcctgcgccccctgctggcggcggcggccagcgcaccggacgccgccgacgcgctggcggccgccgccgcctccgccgcgccgcgggaggggcgcaagcgcaagagtcccggcccggcccggccgcccggaggcggcggcccgcgacccccgaagacgaagaagagcggcgcggacgcccccggctcggacgcccgcgcccccctccccgcgcccgcgcccccctccacgcccccggggcccgagcccgcccccgcccagcccgcggcgccccgggccgccgcggcgcaggcccgcccgcgccccgtggccgtgtcgcgccggcccgccgagggccccgaccccctgggcggctggcggcggcagcccccggggcccagccacacggcggcgcccgcggccgccgccctggaggcctactgctccccgcgcgccgtggccgagctcacggaccacccgctgttccccgtcccctggcgaccggccctcatgtttgacccgcgggccctggcctcgatcgccgcgcggtgcgccgggcccgcccccgccgcccaggccgcgtgcggcggcggcgacgacgacgataacccccacccccacggggccgccgggggccgcctctttggccccctgcgcgcctcgggcccgctgcgccgcatggcggcctggatgcgccagatccccgaccccgaggacgtgcgcgtggtggtgctgtactcgccgctgccgggcgaggacctggccggcggcggggcctcgggggggccgccggagtggtccgccgagcgcggcgggctgtcctgcctgctggcggccctggccaaccggctgtgcgggccggacacggccgcctgggcgggcaattggaccggcgcccccgacgtgtcggcgctgggcgcacagggcgtgctgctgctgtccacgcgggacctggccttcgccggggccgtggagtttctggggctgctcgccagcgccggcgaccggcggctcatcgtggtcaacaccgtgcgcgcctgcgactggcccgccgacgggcccgcggtgtcgcggcagcacgcctacctggcgtgcgagctgctgcccgccgtgcagtgcgccgtgcgctggccggcggcgcgggacctgcgccgcacggtgctggcctcgggccgcgtgttcggcccgggggtcttcgcgcgcgtggaggccgcgcacgcgcgcctgtaccccgacgcgccgccgctgcgcctgtgccgcggcggcaacgtgcgctaccgcgtgcgcacgcgcttcggcccggacacgccggtgcccatgtccccgcgcgagtaccgccgggccgtgctgccggcgctggacggccgggcggcggcctcggggaccaccgacgccatggcgcccggcgcgccggacttctgcgaggaggaggcccactcgcacgccgcctgcgcgcgctggggcctgggcgcgccgctgcggcccgtgtacgtggcgctggggcgcgaggcggtgcgcgccggcccggcccggtggcgcgggccgcggagggacttttgcgcccgcgccctgctggagcccgacgacgacgcccccccgctggtgctgcgcggcgacgacgacggcccgggggccctgccgccggcgccgcccgggattcgctgggcctcggccacgggccgcagcggcaccgtgctggcggcggcgggggccgtggaggtgctgggggcggaggcgggcttggccacgcccccgcggcgggaagttgtggactgggaaggcgcctgggacgaagacgacggcggcgcgttcgagggggacggggtgctgtaacgggccgggacggggcggggcgcttgtgagacccgaagacgcaataaacggcaacaacctgattaagttttgcagtagcgttgtttattcgaggggcgggagggggcgaggggcgggagggggcgaggggcgggagggggcgaggggcgggagggggcgaggggcgggagggggcgaggggcgggagggggcgaggggcgggagggggcgaggggcgggagggggcgaggggcgggagggggcgaggggcgggagggggcgaggggcgggagggggcgaggggcgggagggggcgaggggcgggagggggcgaggggcgggagggggcgaggggcgggagggggcgaggggcgggagggggcgaggggcgggagggggcgaggggcgggagggggcgaggggcgggagggggcgaggggcggtggtggtgcgcgggcgcccccggagggtttggatctctgacctgaatcagatccgcggccgcaaggatctgcgatatccagcacagctagccagctgagcgccggtcgctaccattaccagttggtctggtgtcaaaaataataataaccgggcaggccatgtctgcccgtatttcgcgtaaggaaatccattatgtactatttaaaaaacacaaacttttggatgttcggtttattctttttcttttacttttttatcatgggagcctacttcccgtttttcccgatttggctacatgacatcaaccatatcagcaaaagtgatacgggtattatttttgccgctatttctctgttctcgctattattccaaccgctgtttggtctgctttctgacaaactcggaacttgtttattgcagcttataatggttacaaataaagcaatagcatcacaaatttcacaaataaagcatttttttcactgcattctagttgtggtttgtccaaactcatcaatgtatcttatcatgtctggatctctgacctgagattggcggcactgaggtagagatgcccgaacccccccgagggagcgcgggacgcggccggggagggctggggccggggagggctggggccggggagggctggggccggggagggctggggccggggagggctggggccggggagggctggggctggggaggggcggtggtgtgtagcaggagcggtgtgttgcgccggggtacgtctggaggagcgggaggtgcgcggtgacgtgtggatgaggaacaggagttgttgcgcggtgagttgtcgctgtgagttgtgttgttgggcaggtgtggtggatgacgtgacgtgtgacgtgcggagtgcgccgtgctctgttggtttcacctgtggcagcccgggccccccgcgggcgcgcgcgcgcgcaaaaaaggcgggcggcggtccgggcggcgtgcgcgcgcgcggcgggcgtggggggcggggccgcgggagcggggggaggagcggggggaggagcggggggaggagcggggggaggagcggggggaggagcggggggaggagcggggggaggagcggggggaggagcggggggaggagcggggggaggagcggggggaggagcgg

SEQ ID NO: 15 - DNA, 21816 bp, synthetic construct
  source 1..21816: mol_type = other DNA
gcaggaaaatacaacgtcagaaagttcacagaccccctggaggccattcccggcctccctggggtccaagggaaaaggaggactgatccagacagagggagcctaaatcacccagatctggatccctagctgggccctgaaccagagcgggagaggctacaaagaatgtcaaggagaaacgcaggcaacagtgtagcatcaaggttggtgcagtgggtgagagtgtagcatcaaggttggtgcggtgggtgagagtgtagcatcaaggttggtgcggtgggtgagagtgtagcatcaaggttggtgcggtgggtgagagtgtagcatcaaggttggtgcggtgggtgagagtgtagcatcaaggttggtgcggtgggtgagagtgtagcatcaaggtcaacacagggggtagcgtgttgcatccctactgtggttctgcaggaggttttccttgtggcaggagatacctgctgtgcatcaggcgaagatgtacaatgcctgcaacacagtctcagaatggccgggctcacgcctgtaatcccaacactttgcgaggccgaggccagcagatcgcctgaggtcaggagttggagaccagcctggtcaacatggtgaaaccccatctctattaaaaatgcaaaattagctgggcatgctggctcacgcctgtaatctcagctacccagaagctgaggcaggagaatcgcttgaacccaggaggtggaggttgcagtgagccgaaatcatgccattgcactccagcctgggcaaaaagtgaaactctgtttcaaaaaaaaaaaaaaggctcaggaatggaaaggcaggggtggggtggtaagaaaggaagggagagatggagggaaaaaaacaggaggagaaaggataggaaaaaatgtgtttatgtctatacctgggaagagatcgcaagggagggacagagagaaggaacacaaatctatcaaaaagttaaaagctgatgattctatactgtatgattccctttatgtgaagtgtacaaaacagcaaatccacagacagaaggcagagagggcttcgtggggtgggggggaggggggggtgcatggttgggggtgatggctaagcggttgcagggtttcgttgggggatgatgaaaatgttctacaaccaatgtggtcataaatgcccgaccccgtgaatagactaaaaagcactgaagtgtgcactttgggtgaattgtagggtaggtgaattacatctcaaaaagctgtctaaaaaacaaaaacaaaaaagaaaaagcactggcgaatcttagtgaaagtcatatgggtagtcacatgctattgcttcaacttttctgtaaatctgaagctttcccaaaataaaaagttggaggaggaaggagacagaatccaggtccagggctgatttgacccactccccatttcaaccaaagaggggctcccgaacctcagatctccgccgtcacgtgtcccactagctagtcctcccgcatggctctcgtggacccctgaacccacgcggaatcctatcctttcagcctggccagcggccccgtcaggacagccgcgtcagaagtctcggaggctgccggtatctcatttcctcgtcagtctccctttccttccacacggtcccctggagtctgccgggaaccatgctcacacccttccactccaacccagccagaccctgacaaccaccccatgaagcggcaccagtggtcctgttttaggaaatcagggaagcaagcttcagggacgtgcctggagtcaccagtcacaggcagagctgggaggcaagcccaggactttagaagacatgctggggacccagggatcctgtgtggccatcacacacctgctagaagcaacaccccttccctagaaaaatgaacctggccagacacagtttcaggggctcctggaccccatatgaaggctcctggggtacgatgagtctcagaggacagggagaccagtccctggcaacccctgcatgcccctactcccccccaagtaaacgcatcccctcccagaaagacctgcggcagggttccagcaatcctacctaacgcactcctgggtgagtccctccacccacccaccccgccccggcattccaatcccctcagttactcagggggattgacagtcccagttggtaggggtttgagttctcatcctgtgcgtgtgctgggctccaagcaatcctggaggcaggcccctacacccccatttcacaggtgaggaaactgaggcacaaagaaagacaatcctaggaagcagggtcagcctcggtgcccaggccgcctctaaagctctcagcctggagaccacgggtgaggaggtgtcccccaccccacacacagcacaccagagcccacctcggcgggcgatctccgccttcagcagcccctccatggcgtccgactcggccaggtccaggggcaggtccccgtcactgttgacggcggcgatgttggccccgtggctcaggaggtacctgggggtgggggctggtcagggctgagggtccaggcccccaccccgaccaggtcctgcccggccctcccttgcctcacctggcgatatctaggtagccacaggaggcggccacgtgcagtggcgtccagccctcgttgtctgcctggttcacagtggcgccctgctccaccaagaagcgcaccacctccaggttctcatcaatgcaggcctgggggtgggaaacagccgtcagccgcacctaccccagccacggtgtcccagcaagtcgggactccagagggagccacgaaaacagatccagggacacggtgctaggacagtggggaaaatgacccaacagcctctggccactggctgtttaagatacgcctggttgcccagtggtcaggccggccaggccttcagtgctcagtggaaaccacgaaaggactcctggctatctgcaaacaggaagtgaacggggaagggagggggcttctcatctgggtgcgggaaccccacatggtacctgttagacacggcaaaacccccgtcaccacccacaggtggcgcttccagtgctcagactagggaagaggttccagcccctcctccttcagagccaggagtcctggcccccagcccctcctgccttaaacccagccaggtccttccaagggtcaagctcggaaaccaccccagcagatactctgcaggaacgaagccgtgggcccagggctatgcagggtggaggaaggccaccctgtgctgggacagactcaggggcctgggcgggactcccagaggggtgagacatcctgaaattaacgccgacgggaggggcttaatccgcagcctggagatccagccccctcaacccgggaggtggtccctgcagttacgccaatgataacccccgccagaaaaatcttagtagccttccctttttgttttccgtgccccaactcggcggattgactcggccccttccggaaacacccgaatcaacttctagtcaaattattgttcacgccgcaatgacccacccctggcccgcgtctgtggaactgacccctggtgtacaggagagttcgctgctgaaagtggtcccaaaggggtactagtttttaagctcccaactccccctcccccagcgtctggaggattccacaccctcgcaccgcaggggcgaggaagtgggcggagtccggttttggcgccagccgctgaggctgccaagcagaaaagccaccgctgaggagactccggtcactgtcctcgccccgcctcccccttccctccccttggggaccaccgggcgccacgccgcgaacggtaagtgccgcggtcgtcggcgcctccgccctccccctagggccccaattcccagcgggcgcggcgcgcggcccctccccccgccgggcgcgcgcccgctgccccgcccttcgtggccgcccggcgtgggcggtgccacccctccccccggcggccccgcgcgcagctcccggctccctcccccttcggatgtggcttgagctgtaggcgcggagggccggagacgctgcagacccgcgacccggagcagctcggaggcggtgaagtcggtggctttccttctctctagctctcgctcgctggtggtgcttcagatgccacacgcgtcccgggggcccggttctccgctcccctcggctccggtgcccgtcagtgggcagagcgcacatcgcccacagtccccgagaagttggggggaggggtcggcaattgaaccggtgcctagagaaggtggcgcggggtaaactgggaaagtgatgtcgtgtactggctccgcctttttcccgagggtgggggagaaccgtatataagtgcagtagtcgccgtgaacgttctttttcgcaacgggtttgccgccagaacacaggtaagtgccgtgtgtggttcccgcgggcctggcctctttacgggttatggcccttgcgtgccttgaattacttccacctggctgcagtacgtgattcttgatcccgagcttcgggttggaagtgggtgggagagttcgaggccttgcgcttaaggagccccttcgcctcgtgcatgagttgaggcctggcctgggcgctggggccgccgcgtgcgaatctggtggcaccttcgcgcctgtctcgctgctttcgataagtctctagccatttaaaatttttgatgacctgctgcgacgctttttttctggcaagatagtcttgtaaatgcgggccaagatctgcacactggtatttcggtttttggggccgcgggcggcgacggggcccgtgcgtcccagcgcacatgttcggcgaggcggggcctgcgagcgcggccaccgagaatcggacgggggtagtctcaagctggccggcctgctctggtgcctggcctcgcgccgccgtgtatcgccccgccctgggcggcaaggctggcccggtcggcaccagttgcgtgagcggaaagatggccgcttcccggccctgctgcagggagctcaaaatggaggacgcggcgctcgggagagcgggcgggtgagtcacccacacaaaggaaaagggcctttccgtcctcagccgtcgcttcatgtgactccacggagtaccgggcgccgtccaggcacctcgattagttctcgagcttttggagtacgtcgtctttaggttggggggaggggttttatgcgatggagtttccccacactgagtgggtggagactgaagttaggccagcttggcacttgatgtaattctccttggaatttgccctttttgagtttggatcttggttcattctcaagcctcagacagtggttcaaagtttttttcttccatttcaggtgtcgtgagccaccatgggatctagactggacaagagcaaagtcataaactctgctctggaattactcaatggagtcggtatcgaaggcctgacgacaaggaaactcgctcaaaagctgggagttgagcagcctaccctgtactggcacgtgaagaacaagcgggccctgctcgatgccctgccaatcgagatgctggacaggcatcatacccactcctgccccctggaaggcgagtcatggcaagactttctgcggaacaacgccaagtcataccgctgtgctctcctctcacatcgcgacggggctaaagtgcatctcggcacccgcccaacagagaaacagtacgaaaccctggaaaatcagctcgcgttcctgtgtcagcaaggcttctccctggagaacgcactgtacgctctgtccgccgtgggccactttacactgggctgcgtattggaggaacaggagcatcaagtagcaaaagaggaaagagagacacctaccaccgattctatgcccccacttctgaaacaagcaattgagctgttcgaccggcagggagccgaacctgccttccttttcggcctggaactaatcatatgtggcctggagaaacagctaaagtgcgaaagcggcgggccgaccgacgcccttgacgattttgacttagacatgctcccagccgatgcccttgacgactttgaccttgatatgctgcctgctgacgctcttgacgattttgaccttgacatgctccccgggggctcaggcgccaccaactttagcctgctgaagcaggcaggcgacgtcgaggagaaccccggccctcggaagttcctatactctagaaagaataggaacttcataacttcgtatagcatacattatacgaagttattaatggcaaaactcacatccgctgtaccagtattgactgcaagagatgtggcaggtgcagtggaattttggacagatagactgggcttttcacgtgattttgtcgaagatgattttgcgggagtcgtgagggatgatgtcacacttttcatttctgctgtacaagatcaagttgttcccgataatacacttgcgtgggtttgggtcagaggactcgatgaactttatgcagaatggagcgaagtggtctcaacaaattttcgtgatgcgtctggtccagcaatgacagaaattggtgaacaaccctggggtagggaatttgcgctcagggatccagcggggaattgtgttcattttgtcgcagaagaacaagatggctcaggcgccaccaactttagcctgctgaagcaggcaggcgacgtcgaggagaaccccggccctatggtgagcaagggcgaggagctgttcaccggggtggtgcccatcctggtcgagctggacggcgacgtaaacggccacaagttcagcgtgtccggcgagggcgagggcgatgccacctacggcaagctgaccctgaagttcatctgcaccaccggcaagctgcccgtgccctggcccaccctcgtgaccaccttcggctacggcctgaagtgcttcgcccgctaccccgaccacatgaagcagcacgacttcttcaagtccgccatgcccgaaggctacgtccaggagcgcaccatcttcttcaaggacgacggcaactacaagacccgcgccgaggtgaagttcgagggcgacaccctggtgaaccgcatcgagctgaagggcatcgacttcaaggaggacggcaacatcctggggcacaagctggagtacaactacaacagccacaacgtctatatcatggccgacaagcagaagaacggcatcaaggtgaacttcaagatccgccacaacatcgaggacggcagcgtgcagctcgccgaccactaccagcagaacacccccatcggcgacggccccgtgctgctgcccgacaaccactacctgagctaccagtccgccctgagcaaagaccccaacgagaagcgcgatcacatggtcctgctggagttcgtgaccgccgccgggatcactctcggcatggacgagctgtacaagtgaagttcctatactctagaaagaataggaacttctaagatcataatcagccataccacatttgtagaggttttacttgctttaaaaaacctcccacacctccccctgaacctgaaacataaaatgaatgcaattgttgttgttaacttgtttattgcagcttataatggttacaaataaagcaatagcatcacaaatttcacaaataaagcatttttttcactgcattctagttgtggtttgtccaaactcatcaatgtatcttatcatgtctggagagaccataacttcgtataggatactttatacgaagttataacctggtctcagctaggaaaccagtacaaaggcaacatcctcacttgggtgaacggaaacgcagtattatggttactttttggatacgtgaaacatatcccatggtagtccttagacttgggagtctatcacccctagggcccatatctggaaatagacgccaggttgaatccgtatttggaggtacgatggaacagtctgggtgggacgtgcttcttaattaagggctagggggcttgcggaaacagaagacgtgtgggataaaagaatcgcactaccccaaggaagggcggggcggtttattacagagccagtcccttgagcggggatgcgtcatagacgagatactgcgcgaagtgggtctcccgcgcgtgggcttccccgttgcgggcgctgcggaggagggcggggtcgctggcgcaggtgagcgggtaggcctcctgaaacaggccacacgggtcctccacgagttcgcggcaccccggggggcgcttaaactgtacgtcgctggcggcggtggccgtggacaccgccgaacccgtctccacgatcaggcgctccaggcagcgatgtttggcggcgatgtcggccgacgtaaagaacttaaagcaggggctgagcaccggcgaggccccgttgaggtggtaggccccgttatagagcaggtccccgtacgaaaatcgctgcgacgcccacgggttggccgtggccgcgaaggcccgggacgggtcgctctggccgtggtcgtacatgagggcggtgacatccccctccttgtcccccgcgtaaacgcccccggcggcgcgtccccgggggttgcagggccggcggaagtagttgacgtcggtcgacacgggggtggcgataaactcacacacggcgtcctggccgtggtccatccctgcgcgccgcggcacctgggcgcacccgaacacggggacgggctgggccggccccaggcggtttcccgccacgaccgcgttccgcaggtacacggctgccgcgttgtccagtagagggggagccccgcggcccaggtaaaagttttggggaaggttgcccatgtcggtgacggggttgcggacggttgccgtggccacgacggcggtgtagcccacgcccaggtccacgttcccgcgcggctgggtgagcgtgaagtttacccccccgccagtttcatgccgggccacctggagctggcccaggaagtacgcctccgacgcgcgctccgagaacagcacgttctcagtcacaaagcggtcctgtcggacgacggtgaacccaaacccgggatggaggcccgtcttgagctgatgatgcaaggccacgggactgatcttgaagtaccccgccatgagcgcgtaggtcagcgcgttctccccggccgcgctctcgcggacgtgctgcacgacgggctgtcggatcgacgaaaagtagttggcccccagagccggggggaccagggggacctgccgcgacaggtcgcgcagggccggggggaaattgggcgcgttcgccacgtggtcggccccggcgaacagcgcgtggacggggagggggtaaaaatagtcgccattttggatggtatggtccagatgctggggggccatcagcaggattccggcgtgcaacgccccgtcgaatatgcgcatgttggtggtggacgcggtgttggcgcccgcgtcgggcgccgccgagcagagcagcgccgttgtgcgttcggccatgttgtgggccagcacctgcagcgtgagcatggcgggcccgtccactaccacgcgcccgttgtgaaacatggcgttgaccgtgttggccaccagattggccgggtgcagggggtgcgcggggtccgtcacggggtcgctggggcaatcctcgccgggggtgatctccgggaccaccatgttctgcagggtggcgtatacgcggtcgaagcgaacccccgcggtgcagcagcggccccgcgagaaggcgggcaccatcacgtagtagtaaatcttgtggtgcacggtccagtccgccccccggtgcggccggtcgtccgcggcgtccgcggctcgggcctgggtgttgtgcagcagctggccgtcgttgcggttgaagtccgcggtcgccacgttacacgccgctgcgtacacggggtcgtggccccccgcgctaacccggcagtcgcgatggcggtccagggccgcgcgccgcatcagggcgtcgcagtcccacacgaggggtggcagcagcgccgggtctcgcattaggtgattcagttcggcttgcgcctgcccgcccagttccgggccggtcagggtaaagtcatcaaccagctgggccagggcctcgacgtgcgccaccaggtcccggtacacggccatgcactcctcgggaaggtctcccccgaggtaggtcacgacgtacgagaccagcgagtagtcgttcacgaacgccgcgcaccgcgtgttgttccagtagctggtgatgcactggaccacgagccgggccagggcgcagaagacgtgctcgctgccgtgtatggcggcctgcagcaggtaaaacaccgccgggtagttgcggtcttcgaacgccccgcgaacggcggcgatggtggcgggggccatggcgtggcgtcccacccccagctccaggccccgggcgtcccggaacgccgccggacatagcgccaggggcaagttgccgttcaccacgcgccaggtggcctggatctcccccgggccggccgggggaacgtccccccccggcagctccacgtcggccacccccacgaagaagtcgaacgcggggtgcagctcaagagccaggttggcgttgtcgggctgcataaactgctccggggtcatctggccttccgcgacccatcggacccgcccgtgggccaggcgctgcccccaggcgttcaaaaacagctgctgcatgtctgcggcggggccggccggggccgccacgtacgccccgtacggattggcggcttcgacggggtcgcggttaaggcccccgaccgccgcgtcaacgttcatcagcgaagggtggcacacggtcccgatcgcgtgttccagagacaggcgcagcacctggcggtccttcccccaaaaaaacagctggcggggcgggaaggcgcggggatccgggtggccgggggcggggactaggtccccggcgtgcgcggcaaaccgttccatgaccggattgaacaggcccaggggcaggacgaacgtcaggtccatggcgcccaccagggggtagggaacgttggtggcggcgtagatgcgcttctccagggcctccaaaaagatcagcttctcgccgatggacaccagatccgcgcgcacgcgcgtcgtctggggggcgctctcgagctcgtccagcgtctgccggttcaggtcgagctgctcctcctgcatctccagcaggtggcggcccacgtcgtccagacttcgcacggccttgcccatcacgagcgccgtgaccaggttggccccgttcaggaccatctcgccgtacgtcaccggcacgtcggcttcggtgtcctccactttcaggaaggactgcaggaggcgctgtttgatcggggcggtggtgacgagcaccccgtcgaccggacgcccgcgcgtgtcggcatgcgtcagacggggcacggccacggagggctgcgtggccgtggtgaggtccacgagccaggcctcgacggcctcccggcggtggcccgccttgcccaggaaaaagctcgtctcgcagaagcttcgctttagctcggcgaccagggtcgcccgggccaccctggtggccaggcggccgttgtccaggtatcgttgcatcggcaacaacaaagccaggggcggcgccttttccagcagcacgtgcagcatctggtcggccgtgccgcgctcaaacgccccgaggacggcctggacgttgcgagcgagctgttggatggcgcgcaactggcgatgcgcgctgatacccgtcccgtccagggcctcccccgtgagcagggcgatggcctcggtggccaggctgaaggcggcgttcagggcccggcggtcgataatcttggtcatgtaattgtgtgtgggttgctcgatggggtgcgggccgtcgcgggcaatcagcggctggtggacctcgaactgtacgcgcccctcgttcatgtaggccagctccggaaacttggtacacacgcacgccaccgacaacccgagctccagaaagcgcacgagcgacagggtgttgcaatacgaccccaacagggcgtcgaactcgacgtcatacaggctgtttgcatcggagcgcacgcgggaaaaaaaatcgaacaggcgtcgatgcgacgccacctcgatcgtgctaaggagggacccggtcggcaccatggccgcggcataccggtatcccggagggtcgcggttgggagcggccatggggtcgcgtggagatcggctgtctctagcgatattggcccggggaggctaagatccaccccaacgcccggccacccgtgtacgtgcccgacggcccaaggtccaccgaaagacacgacgggcccggacccaaaaaggcgggggatgctgtgtgagaggccgggtgtcggtcgggggggaaaggcaccgggagaaggctgcggcctcgttccaggagaacccagtgtccccaacagacccggggacgtgggatcccaggccttatataccccccccgccccacccccgttagaacgcgacgggtgcattcaagatggccctggtccaaaagcgtgccaggaagaaattggcagaggcggcaaagctgtccgccgccgccacccacatcgaggccccggccgcgcaggctatccccagggcccgtgtgcgcaggggatcggtgggcggcagcatttggttggtggcgataaagtggaaaagcccgtccggactgaaggtctcgtgggcggcggcgaacaaggcacacagggccgtgcctcccaaaaacacggacatcccccaaaacacgggcgccgacaacggcagacgatccctcttgatgttaacgtacaggaggagcgcccgcaccgcccacgtaacgtagtagccgacgatggcggccaggatacaggccggcgccaccacccttccggtcagcccgtaatacatgcccgctgccaccatctccaacggcttcaggaccaaaaacgaccaaaggaacagaatcacgcgctttgaaaagaccggctgggtatggggcggaagacgcgagtatgccgaactgacaaaaaagtcagaggtgccgtacgaggacaatgaaaactgttcctccagtggcagttctccctcctcccccccaaaggcggcctcgtcgaccagatctcgatccaccagaggaaggtcatcccgcatggtcatggggtgtgcggtggaggtggggagaccgaaaccgcaaagggtcgcttacgtcagcaggatcccgagatcaaagacacccgggttcttgcacaaacaccacccgggttgcatccgcggaggcgagtgttttgataaggccgttccgcgccttgatataacctttgatgttgaccacaaaacccggaatttacgcctacgccccaatgcccacgcaagatgaggtaggtaaccccccccccgtgggtgtgacgttgcgtttagttcattggaggccaaggggaaaatggggtggggaggaaacggaaaacccagtaggccgtgttgggaacacgcccggggttgtcctcaaaaggcagggtccatactacggaagccgtcgttgtattcgagacctgcctgtgcgacgcacgtcggggttgcctgtgtccggttcggccccaccgcgtgcggcacgcacgaggacgagtccgcgtgctttattggcgttccaagcgttgccctccagtttctgttgtcggtgttcccccatacccacgcccacatccaccgtagggggcctctgggccgtgtcacgtcgccgcccgcgatggagcttagctacgccaccaccatgcactaccgggacgttgtgttttacgtcacaacggaccgaaaccgggcctactttgtgtgcggggggtgtgtttattccgtggggcggccgtgtgcctcgcagcccggggagattgccaagtttggtctggtcgttcgagggacaggcccagacgaccgcgtggtcgccaactatgtacgaagcgagctccgacaacgcggcctgcaggacgtgcgtcccattggggaggacgaggtgtttctggacagcgtgtgtcttctaaacccgaacgtgagctccgagctggatgtgattaacacgaacgacgtggaagtgctggacgaatgtctggccgagtactgcacctcgctgcgaaccagcccgggtgtgctaatatccgggctgcgcgtgcgggcgcaggacagaatcatcgagttgtttgaacacccaacgatagtcaacgtttcctcgcactttgtgtataccccgtccccatacgtgttcgccctggcccaggcgcacctcccccggctcccgagctcgctggaggccctggtgagcggcctgtttgacggcatccccgccccacgccagccacttgacgcccacaacccgcgcacggatgtggttatcacgggccgccgcgccccacgacccatcgccgggtcgggggcggggtcggggggcgcgggcgccaagcgggccaccgtcagcgagttcgtgcaagtcaaacacattgaccgcgtgggccccgctggcgtttcgccggcgcctccgccaaacaacaccgactcaagttccctggtgcccggggcccaggattccgccccgcccggccccacgctaagggagctgtggtgggtgttttatgccgcagaccgggcgctggaggagccccgcgccgactctggcctcacccgcgaggaggtacgtgccgtacgtgggttccgggagcaggcgtggaaactgtttggctccgcgggggccccgcgggcgtttatcggggccgcgttgggcctgagccccctccaaaagctagccgtttactactatatcatccaccgagagaggcgcctgtcccccttccccgcgctagtccggctcgtaggccggtacacacagcgccacggcctgtacgtccctcggcccgacgacccagtcttggccgatgccatcaacgggctgtttcgcgacgcgctggcggccggaaccacagccgagcagctcctcatgttcgaccttctccccccaaaggacgtgccggtgggaagcgacgtgcaggccgacagcaccgctctgctgcgctttatagaatcgcaacgtctcgccgtccccgggggggtgatctcccccgagcacgtcgcgtaccttggtgcgttcctgagcgtgctgtacgctggccgcgggcgcatgtccgcagccacgcacaccgcgcggctgacaggggtgacctccctggtgctagcggtgggtgacgtggaccgtctttccgcgtttgaccgcggagcggcgggcgcggccagccgcacgcgggccgccgggtacctggatgtgcttcttaccgttcgtctcgctcgctcccaacacggacagtctgtgtaacagaccccaataaacgtatgtcgctaccacacccttgtgtgtcaatggacgcctctccgggggggaagggaaaacaaagaggggctgggggagcggcaccaccggggcctgaacaaacaaaccacagacacggttacagtttattcggtcgggcggagaaacggccgaagccacgcccccacaacttcgtatagaaaggtatatacgaagttgtggatgaactcggctcgtttatttccacccagttgtcatggcgataggggaggggggcaaggagagcaatgggcctttccctttcaaggacctgcccagtacaggcatccctgtgaaagatgcctgaggcctgggcaccagggactccagagtccaggcccaacccctccccattcaacccaggaggccaggccccagcccttccgccctcagatgaaggagtccaggcccccagcctctccccattcagacccaggggtccaggcccagccccgcctccctaagacccagaagtccaggcccccagcccctcctccctcagacccacgagtccaggccccagcccctcctccctcggacccaggagtccaggcccccagtccctccaccctcagacccaggagtccaggccccagcccctcctccctcggacccaggagtccaggccccagcccctcctctctcaaacccaggagcccaggcccccagctcttctctgttcagccctaagaatcctggctccagcccctcctactctagcccccaaccccctagccactaaggcaattggggtgcaggaatgggggcagggtaccagcctcaccaagtggttgataaacccacgtggggtaccctaagaacttgggaacagccacagcaggggggcgatgcttggggacctgcctggagaaggatgcaggacgagaaacacagccccaggtggagaaactggccgggaatcaagagtcacccagagacagtgaccaaccatccctgttttcctaggactgagggtttcagtgctaaaactaggctgtcctgggcaaacagcataagctggtcaccccacacccagacctgacccaaacccagctcccctgcttcttggccacgtaacctgagaagggaatccctcctctctgaaccccagcccaccccaatgctccaggcctcctgggataccccgaagagtgagtttgccaagcagtcaccccacagttggaggagaatccacccaaaaggcagcctggtagacagggctggggtggcctctcgtggggtccaggccaagtaggtggcctggggcctctgggggatgcaggggaagggggatgcaggggaacggggatgcaggggaacggggctcagtctgaagagcagagccaggaacccctgtagggaaggggcaggagagccaggggcatgagatggtggacgaggaagggggacagggaagcctgagcgcctctcctgggcttgccaaggactcaaacccagaagcccagagcagggccttagggaagcgggaccctgctctgggcggaggaatatgtcccagatagcactggggactctttaaggaaagaaggatggagaaagagaaagggagtagaggcggccacgacctggtgaacacctaggacgcaccattctcacaaagggagttttccacacggacacccccctcctcaccacagccctgccaggacggggctggctactggccttatctcacaggtaaaactgacgcacggaggaacaatataaattggggactagaaaggtgaagagccaaagttagaactcaggaccaacttattctgattttgtttttccaaactgcttctcctcttgggaagtgtaaggaagctgcagcaccaggatcagtgaaacgcaccagacggccgcgtcagagcagctcaggttctgggagagggtagcgcagggtggccactgagaaccgggcaggtcacgcatcccccccttccctcccaccccctgccaagctctccctcccaggatcctctctggctccatcgtaagcaaaccttagaggttctggcaaggagagagatggctccaggaaatgggggtgtgtcaccagataaggaatctgcctaacaggaggtgggggttagacccaatatcaggagactaggaaggaggaggcctaaggatggggcttttctgtcaccaatcctgtccctagtggccccactgtggggtggaggggacagataaaagtacccagaaccagagccacattaaccggccctgggaatataaggtggtcccagctcggggacacaggatccctggaggcagcaaacatgctgtcctgaagtggacataggggcccgggttggaggaagaagactagctgagctctcggacccctggaagatgccatgacagggggctggaagagctagcacagactagagaggtaaggggggtaggggagctgcccaaatgaaaggagtgagaggtgacccgaatccacaggagaacggggtgtccaggcaaagaaagcaagaggatggagaggtggctaaagccagggagacggggtactttggggttgtccagaaaaacggtgatgatgcaggcctacaagaaggggaggcgggacgcaagggagacatccgtcggagaaggccatcctaagaaacgagagatggcacaggccccagaaggagaaggaaaagggaacccagcgagtgaagacggcatggggttgggtgagggaggagagatgcccggagaggacccagacacggggaggatccgctcagaggacatcacgtggtgcagcgccgagaaggaagtgctccggaaagagcatccttgggcagcaacacagcagagagcaaggggaagagggagtggaggaagacggaacctgaaggaggcggcagggaaggatctgggccagccgtagaggtgacccaggccacaagctgcagacagaaagcggcacaggcccaggggagagaatgcaggtcagagaaagcaggacctgcctgggaaggggaaacagtgggccagaggcggcgcagaagccagtagagctcaaagtggtccggactcaggagagagacggcagcgttagagggcagagttccggcggcacagcaagggcactcgggggcgagaggagggcagcgcaaagtgacaatggccagggccaggcagatagaccagactgagctatgggagctggctcaggttcaggagagggcagggcagggaaggagacaaagtccaggaccggctggaggggctcaacatcggaagaggggaagtcgagggagggatggtaaggaggactgcatgggtcagcacaggctgccaaagccagggccagttaaagcgactccaatgcggaagagagtaggtcgaaggggaatggtaaggaggcctggggcagagtggtcagcacagagtggctaagcccagggccagttgaagcggctccaattcggaagtggggtggtcgaaggggaatggtaagggggactgggacggggtgtcagcatagggtggcaaagcccagggccaggaacgacggggcggatcgagactggcaacggggaaggaggatgccccaggtggcgcagcagagggtggacctggccccgggagacgccgggcggggggcgctgacctggtgcagggcgctgataccgtcggcgttggtggagtccagcacggcgcgggcgggcggcggcgcggcggggtcgagctcggcgccggggccagggtcggcggcgcgcagcatcagacgcgcctcgtccaggtcgccgcccgcacaggccgccaggaactcggcggcgcgctcgaagcggacggtgcgggcgcggcgctctccggggccaggctcggcgcccgcccgcgccccccactgccgcagctgctcccgtcgccgctcccgggcagccgccgccgccgcccccgggccagccgccgggccatcctctccggacatcgcaccgcccgcccgcccagcgagcgagcgagcgccgagccccaaccgccgccaccacccgcccgcccgcccgccccgggggccgccgggaactgccgctggccccccaccgccccaaggatctcccggtccccgcccggcgtgctgacgtcacggcgctgccccagggtgtgctgggcaggtcgcggggagcgctgggaaatggagtccattagcagaagtggcccttggccacttccaggagtcgctgtgccccgatgcacactgggaagtccgcagctccgaggcgcccagtggaaatcgccagatgagggcctcctccggggaatgctgggaaatggagtctacaggccggaggggtgccccacggcatactaggaagtgtgtagcaccgggtaaaggggatgaatagcagactgccccggggcagttaggaattcgactggacagccgcgtgggagggagtgcggggagaggcagagttgttttgttattgttgttttattttgttttctttgttttgagacggagtctcgctctgtcgccacgctggagttcagtggcgcgatatcggctcgctgcaacctccgcttcccaggttcaagcaattctggctcagtccccagagtagctgggataacaggcgcgcgccaccccgccctgctaatttttatatttttagtagagacgggatttcaccatgttggccatgatggtcttgatctcttgacctcatgatccgcccgcctcggcctgtaatcctgctgggatgacgagcgtaagccaccatgcccagctgggttttatttattttggtttttttcctgaccccttaactagaaataagctccacgagagcgggatcttttgtcttctgtgcactacttgtcctcggttcttagaacagaacctgagagaacctgatcgcaaatatttttggaatgaatgaatgaatgggttcaccagggcaccatgggaaactgagtccgcaacctagaagccatgaaagacagtccacttccaagcttccctgggtgacctcgcagggcatgctgggaaatgaaatttgcggtgaaaaggtcaggaccacgatcctagggcacgctgggaaatgtagcccacagggccacacccctaaaagcacagtggggtgcaaggcagggccccaaggcatttagggctcggggcaagagaaatccacactccactccctaatggtaatccctgagccacaccgagtaaaggaacccaagacacagtgtccacagggacagggctctcagagctttcactggcccgcgcttctcctgcgcccacccggacctcctgggaaccgcccaggccctcgcgcgctctcaaggcatgctgggattggtggtcccgggcaaggagttccagcaggtggggggcgaatcacctttcagcgggcccaagcgatgagcacaccttgatcttcaccttacggatcccgcgcccaactcaagattgggaaggtggctggcactttgtgacaggaagagtcccataaaaatcatacagaaaagggccaaaatcgggacagagactacagactgtttcccaagcgctgtgggagtttcccacccactctgaagtccttgggtttgcgcggagacgtaaactgcgcatcccacgaggcctgtttctttccctctctctttctcttttgttgttgttgttgctgctgctgttacgaaaatttttgtggttttattgtatcatgaggcattgaaacatccggcgactcaatgtctaggcggtgaggcagccgctttctccttcactttctttgggttaagtagagcaacttgtcagtagttttgtttttttttgttgttgttgttgtttttgagacggaggcttgctctgtcgcccaggctggagtgcagtggcgcgatgtcggctcactgcaagctctgcctcccgggttcaagcgattctcctgcctcagcctcctgagtagctgggactacaggcgtgctccaccacgcccggctaatttttgttttttagtagagacggggtttcaccatgttggccaggctggtctcgaattcctgacctcgtgatccgactgcctcggcctcccaaaatgctgggattacaggcgtgagccgccgcgaccggccagattttttttttttttaaaggacaaccttttgcattacttaagtctttccaaggcatgcgctggtacaacacaaacttttcccattacatgcagctagtctagtgtccagacgtcatgcacaacacctccgtggcatcagcgcactgcgcccactcccactgcgaccctgctcatttgtgcatcatatctggaggagtggcaatagttctggaaagaggagggaagaggaggcagcgtgagggcccggtggagaggaggtcagctgaagttgtgcagagcaagcctgcatatcattggtgcaaacccaagcatcattgcatcgctgatgttttgttttgtttggttttgttttgtttttgagacggagtctcactgtgtcgcccaggct

SEQ ID NO: 16 - DNA, 131312 bp, synthetic construct
  source 1..131312: mol_type = other DNA
tgaaattaacgccgacgggaggggcttaatccgcagcctggagatccagccccctcaacccgggaggtggtccctgcagttacgccaatgataacccccgccagaaaaatcttagtagccttccctttttgttttccgtgccccaactcggcggattgactcggccccttccggaaacacccgaatcaacttctagtcaaattattgttcacgccgcaatgacccacccctggcccgcgtctgtggaactgacccctggtgtacaggagagttcgctgctgaaagtggtcccaaaggggtactagtttttaagctcccaactccccctcccccagcgtctggaggattccacaccctcgcaccgcaggggcgaggaagtgggcggagtccggttttggcgccagccgctgaggctgccaagcagaaaagccaccgctgaggagactccggtcactgtcctcgccccgcctcccccttccctccccttggggaccaccgggcgccacgccgcgaacggtaagtgccgcggtcgtcggcgcctccgccctccccctagggccccaattcccagcgggcgcggcgcgcggcccctccccccgccgggcgcgcgcccgctgccccgcccttcgtggccgcccggcgtgggcggtgccacccctccccccggcggccccgcgcgcagctcccggctccctcccccttcggatgtggcttgagctgtaggcgcggagggccggagacgctgcagacccgcgacccggagcagctcggaggcggtgaagtcggtggctttccttctctctagctctcgctcgctggtggtgcttcagatgccacacgcgtcccgggggcccggttctccgctcccctcggctccggtgcccgtcagtgggcagagcgcacatcgcccacagtccccgagaagttggggggaggggtcggcaattgaaccggtgcctagagaaggtggcgcggggtaaactgggaaagtgatgtcgtgtactggctccgcctttttcccgagggtgggggagaaccgtatataagtgcagtagtcgccgtgaacgttctttttcgcaacgggtttgccgccagaacacaggtaagtgccgtgtgtggttcccgcgggcctggcctctttacgggttatggcccttgcgtgccttgaattacttccacctggctgcagtacgtgattcttgatcccgagcttcgggttggaagtgggtgggagagttcgaggccttgcgcttaaggagccccttcgcctcgtgcatgagttgaggcctggcctgggcgctggggccgccgcgtgcgaatctggtggcaccttcgcgcctgtctcgctgctttcgataagtctctagccatttaaaatttttgatgacctgctgcgacgctttttttctggcaagatagtcttgtaaatgcgggccaagatctgcacactggtatttcggtttttggggccgcgggcggcgacggggcccgtgcgtcccagcgcacatgttcggcgaggcggggcctgcgagcgcggccaccgagaatcggacgggggtagtctcaagctggccggcctgctctggtgcctggcctcgcgccgccgtgtatcgccccgccctgggcggcaaggctggcccggtcggcaccagttgcgtgagcggaaagatggccgcttcccggccctgctgcagggagctcaaaatggaggacgcggcgctcgggagagcgggcgggtgagtcacccacacaaaggaaaagggcctttccgtcctcagccgtcgcttcatgtgactccacggagtaccgggcgccgtccaggcacctcgattagttctcgagcttttggagtacgtcgtctttaggttggggggaggggttttatgcgatggagtttccccacactgagtgggtggagactgaagttaggccagcttggcacttgatgtaattctccttggaatttgccctttttgagtttggatcttggttcattctcaagcctcagacagtggttcaaagtttttttcttccatttcaggtgtcgtgagccaccatgggatctagactggacaagagcaaagtcataaactctgctctggaattactcaatggagtcggtatcgaaggcctgacgacaaggaaactcgctcaaaagctgggagttgagcagcctaccctgtactggcacgtgaagaacaagcgggccctgctcgatgccctgccaatcgagatgctggacaggcatcatacccactcctgccccctggaaggcgagtcatggcaagactttctgcggaacaacgccaagtcataccgctgtgctctcctctcacatcgcgacggggctaaagtgcatctcggcacccgcccaacagagaaacagtacgaaaccctggaaaatcagctcgcgttcctgtgtcagcaaggcttctccctggagaacgcactgtacgctctgtccgccgtgggccactttacactgggctgcgtattggaggaacaggagcatcaagtagcaaaagaggaaagagagacacctaccaccgattctatgcccccacttctgaaacaagcaattgagctgttcgaccggcagggagccgaacctgccttccttttcggcctggaactaatcatatgtggcctggagaaacagctaaagtgcgaaagcggcgggccgaccgacgcccttgacgattttgacttagacatgctcccagccgatgcccttgacgactttgaccttgatatgctgcctgctgacgctcttgacgattttgaccttgacatgctccccgggggctcaggcgccaccaactttagcctgctgaagcaggcaggcgacgtcgaggagaaccccggccctcggaagttcctatactctagaaagaataggaacttcataacttcgtatagcatacattatacgaagttattaatgacagaatataaaccaacagtccggctggctacacgagatgatgtacctcgcgctgtgagaacactggctgctgcttttgctgattatccggcgacaagacatactgttgaccccgatagacatattgaacgcgtgacagaattgcaggagctgtttctgactagggtgggtttagatattggtaaagtttgggtggccgatgatggagcagccgtagctgtgtggacaaccccagaatctgttgaggccggagccgtctttgctgaaattggacccagaatggcagaactgtctggctctaggctcgcggcccaacagcaaatggaaggattgctcgcacctcatcgccctaaagaacctgcctggtttctcgctacggtaggggtgtccccagatcatcaaggtaaaggcctcggatccgctgtggtcctgccaggggtcgaagctgcggaaagagcaggagttccagcatttcttgaaacatctgcacctaggaatctgcccttttatgaaaggctgggatttacagtaactgcagatgttgaagtaccagagggtccccggacatggtgtatgacgagaaaaccaggggcgggctcaggcgccaccaactttagcctgctgaagcaggcaggcgacgtcgaggagaaccccggccctatggtgagcaagggcgaggagctgttcaccggggtggtgcccatcctggtcgagctggacggcgacgtaaacggccacaagttcagcgtgtccggcgagggcgagggcgatgccacctacggcaagctgaccctgaagttcatctgcaccaccggcaagctgcccgtgccctggcccaccctcgtgaccaccttcggctacggcctgaagtgcttcgcccgctaccccgaccacatgaagcagcacgacttcttcaagtccgccatgcccgaaggctacgtccaggagcgcaccatcttcttcaaggacgacggcaactacaagacccgcgccgaggtgaagttcgagggcgacaccctggtgaaccgcatcgagctgaagggcatcgacttcaaggaggacggcaacatcctggggcacaagctggagtacaactacaacagccacaacgtctatatcatggccgacaagcagaagaacggcatcaaggtgaacttcaagatccgccacaacatcgaggacggcagcgtgcagctcgccgaccactaccagcagaacacccccatcggcgacggccccgtgctgctgcccgacaaccactacctgagctaccagtccgccctgagcaaagaccccaacgagaagcgcgatcacatggtcctgctggagttcgtgaccgccgccgggatcactctcggcatggacgagctgtacaagtgaagttcctatactctagaaagaataggaacttctaagatcataatcagccataccacatttgtagaggttttacttgctttaaaaaacctcccacacctccccctgaacctgaaacataaaatgaatgcaattgttgttgttaacttgtttattgcagcttataatggttacaaataaagcaatagcatcacaaatttcacaaataaagcatttttttcactgcattctagttgtggtttgtccaaactcatcaatgtatcttatcatgtctggagagaccataacttcgtataggatactttatacgaagttataacctggtctcagctaggaaaccagtacaaaggcaacatcctcacttgggtgaacggaaacgcagtattatggttactttttggatacgtgaaacatatcccatggtagtccttagacttgggagtctatcacccctagggcccatatctggaaatagacgccaggttgaatccgtatttggaggtacgatggaacagtctgggtgggacgtgcttcttaattaacgggtcttttgtgttggccctaataaaaaaaaactcaggggatttttgctgtctgttgggaaataaaggtttacttttgtatcttttccctgtctgtgttggatgtatcgcggggatgcgtgggagtgggggtgcgtgggagtgggggtgcgtgggagtgggggtgcgtgggagtgggggtgcgtgggagtgggggtgcgtgggagtgggggtgcgtgggagtgggggtgccatgttgggcaggctctggtgttaaccacagagccgcggcccgggctgcctgaccaccgatccccgaaagcatcctgccactggcatggagccagaaccacagtgggttgggtgtgggtgttaagtttccgcgagcgcctgcccgcccggactgacctggcctctggccgccacaaagggcggggggggttaactacactatagggcaacaaaggatgggaggggtggcggggcgggacggggcgcccaaaagggggtcggccacaccacagacccatagagcccaccgcatccccagcatgcctgctattgtcttcccaatcctcccccttgctgtcctgccccaccccaccccccagaatagaatgacacctactcagacaatgcgatgcaatttcctcattttattaggaaaggacagtgggagtggcaccttccagggtcaaggaaggcacgggggaggggcaaacaacagatggctggcaactagaaggcacaggaattcacttgtacagctcgtccatgcccatcacatcggtaaacgccttttgccactccttgaagttcagctcggtcttggagtgcttgagttccgtcttacggaacacgtacatcggctggttcttcagatagttagccgccattggcttggcaaaggtgtaggtggtccgcgcagtgctccggtagcgcttgccatttccagtggtgtaactccacttaaaggtactgatgatggttttgtcgttggggtaagtcttcttcgacctgcaccagtccgcagcggtcagcgagttggtcatcacaggaccgtcagcagggaaaccagtccccttcacctgggcctctcctttgatgtggcttccctcgtaggtgtagcggtagttcacagtaagggaggcaccatcttcaaactgcattgtgcgatggacttggtatccagagccatctaccatggcggcctggaaaggcgacatcccgtcagggtagggcaggtactgatggaagccatacccgatatgagggaccagaatccagggggagaactggaggtcgcccttggtggacttcaggtttaactcctcataaccatcatttggattgccggtgccctgacccaccatgtcaaagtccacaccgttgatggagccaaagatgtgtaactcatgtgtcgctgggagagaggccatgttatcctcctcacccttgctcactgggccgggattttcctccacgtccccgcatgttagaagacttcccctgccctcgccggagcccccaccgtactcgtcaattccaagggcatcggtaaacatctgctcaaactcgaagtcggccatatccagagcgccgtagggggcggagtcgtggggggtaaatcccggccccggggaatccccgtcccccaacatgtccagatcgaaatcgtctagcgcgtcggcatgcgccatcgccacgtcctcgccgtctaagtggagctcgtcccccaggctgacatcggtcgggggggccgtcgacagtctgcgcgtgtgtcccgcggggagaaaggacaggcgcggagccgccagccccgcctcttcgggggcgtcgtcgtccgggagatcgagcaggccctcgatggtagacccgtaattgtttttcgtacgcgcgcggctgtacgcgtgttcccgcatgaccgcctcggagggcgaggtcgtgaagctggaatacgagtccaacttcgcccgaatcaacaccataaagtacccagaggcgcgggcctggttgccatgcagggtgggaggggtcgtcaacggcgcccctggctcctccgtagccgcgctgcgcaccagcgggaggttaaggtgctcgcgaatgtggtttagctcccgcagccggcgggcctcgattggcactccccggacggtgagcgctccgttgacgaacatgaagggctggaacagacccgccaactgacgccagctctccaggtcgcaacagaggcagtcaaacaggtcgggccgcatcatctgctcggcgtacgcggcccataggatctcgcgggtcaaaaatagatacaaatgcaaaaacaaaacacgcgccagacgagcggtctctcggtagtacctgtccgcgatcgtggcgcgcagcatttctcccaggtcgcgatcgcgtccgcgcatgtgcgcctggcggtgcagctgccggacgctggcgcgcaggtaccggtacagggccgagcagaagttggccaacacggttcgatagctctcctcccgcgcccgtagctcggcgtggaagaaacgagagagcgcttcgtagtagagcccgaggccgtcgcgggtggccggaagcgtagggaaggccacgtcgccgtgggcgcgaatgtcgatttgggtgcgttcggggacgtacgcgtccccccattccaccacatcgctgggcagcgttgataggaatttacactcccggtacaggtcggcgttggtcggtagcgccgaaaacagatcctcgttccaggtatcgagcatggtacatagcgcggggcccgcgctaaagcccaagtcgtcgaggagacggttaaagagggcggcgggggggacgggcatgggtggggagggcatgagctgggcctggctcaggcgccccgttgcgtacagcgggggggccgccggggtgtttttgggacccccggccgggcgggggggcggtggcgaagcgccgtccgcgttcatgtcggcaaacagctcgtcgaccaagaggtccattttacgagggtaggaagtggtacggaaagttggtataagacaaaagtgttgtggaattgaagtttactcaaaaaatcagcactcttttataggcgccctggtttacataagcaaagcttatacgttctctatcactgatagggagtaaactggatatacgttctctatcactgatagggagtaaactgtagatacgttctctatcactgatagggagtaaactggtcatacgttctctatcactgatagggagtaaactccttatacgttctctatcactgatagggagtaaagtctgcatacgttctctatcactgatagggagtaaactcttcatacgttctctatcactgatagggagtaaactcgaggggatccgtgggtgttggggggtggggcagaggggtggggggggagacagaaacaggaacatagttagaaaacaagaatgcggtgcagccagagaatcacaggagacgaggggatgggcgtgttggttaccaacccacacccaggcatgctcggtggtatgaaggagggggggcggtgtttcttagagaccgccgggggacgtggggttggtgtgcaaaggcacgcgcacccgcgccggccaggtgggccggtaccccatccccccctcccccgacccttcccacccccgcgtgccagagatcaccccggtcccccggcacccgccactcctccatatcctcgctttaggaacaactttaggggggggtacacacgcgccgtgcatttccttccacacccccccccctcccccgcactcccccccccccccaggcagtaagacccaaacatagagagccaggcacaaaaacacaggcggggtgggacacatgccttcttggagtacgtgggtcattggcgtggggggttacagcgacaccggccgaccccctggcggtcttccagccggcccttagataagggggcagttggtggtcggacgggtaagtaacagagtctaactaagggtgggagggggggaaaataacgggctggtgtgctgtaacacgagcccacccgcgagtggcgtggccgaccttagcctctggggcgccccctgtcgtttgggtccccccccctctattggggagaagcaggtgtctaacctacctggaaacgcggcgtctttgttgaacgacaccggggcgccctcgacgagtgggataacgggggaggaagggagggaggagggtactgggggtgaagggggggggaagaagcgagaacaggaaaggcgacggagcccggcagaacaccgagaaaaaaaaacgcagcgcatgcgccgggccgttgtggggccccgggccggggccccttgggtccgccggggccccgggccgggccgccacgggggccggccgttggcggtaaccccgagtgttcatctcaggccccgggccgggaacccggaaaagcctccggggggcctttttcgcgtcgcgtgccggcgagcgggtccggacggggcccggaccgccgcggtcgggggcccctcgtcccgggccgtacgcggccttcgccccgtgaggggacagacgaacgaaacattccggcgacggaacgaaaaacaccccagacgggttaaagaaacagaaaccgcaacccccaccacccccgaaacggggaaaacgaaaaaacagaccagcggccggccggcgcttagggggaggatgtcgccgacgccccttggccgccccggctgcaggggggcccggagagccgcggcacccggacgcgcccggaaagtctttcgcaccaccggcgatcggcacggccgcgcccccgcttttataaaggctcagatgacgcagcaaaaacaggccacagcaccacatgggtaggtgatgtaattttattttcctcgtctgcggcctaatggatttccgggcgcggtgcccctgtctgcagagcacttaacggattgatatctcgcgggcacgcgcgcccttaatggaccggcgcggggcggggggccggatacccacacgggcggggggggggtgtcgcgggccgtctgctggcccgcggccacataaacaatgactcggggcctttctgcctctgccgcttgtgtgtgcgcgcgccggctctgcggtgtcggcggcggcggcggcggtggccgccgtgttcggtctcggtagccggccggcgggtggactcgcggggggccggagggtggaaggcaggggggtgtaggatgggtatcaggacttccacttcccgtccttccatcccccgttcccctcggttgttcctcgcctcccccaacaccccgccgctttccgttggggttgttattgttgtcgggatcgtgcgggccgggggtcgccggggcaggggcgggggcgtgggcgggggtgctcgtcgatcgaccgggctcagtgggggcgtggggtgggtgggagaaggcgaggagactggggtgggggtgtcggtgggtggttgttttttttttttgtggttgttttttgtgtctgtttccgtcccccgtcacccccctccctccgtcccctccgtccccccgtcgcgggtgtttgtgtttgtttattccgacatcggtttatttaaaataaacacagccgttctgcgtgtctgttcttgcgtgtggctgggggcttatatgtggggtcccgggggcgggatggggtttagcggcggggggcggcgcgccggacggggcgctggagataacggcccccggggaacgggggaccggggctgggtatcccgaggtgggtgggtgggcggcggtggccgggccgggccgggccgggccgggtgggcggggtttggaaaaacgaggaggaggaggagaaggcggggggggagacggggggaaagcaaggacacggcccggggggtgggagcgcgggccgggccgctcgtaagagccgcgacccggccgccggggagcgttgtcgccgtcggtctgccggcccccgtccctcccttttttgaccaaccagcgccctcccccccaccaccattcctactaccaccaccaccaccacccccaccaccgacacctcccgcgcacccccgcccacatccccccaccccgcaccacgagcacggggtgggggtagcaggggatcaaaggggggcaaagccggcggggcggttcgggggggcgggagaccgagtaggcccgcccatacgcggcccctcccggcagccacgccccccagcgttgggtgtcacggggaaagagcaggggagagggggggagaggggagagggggggagaggggagagggggggagaggggagagggggggagaggggagagggggggagaggggagagggggggagaggggagagggggggagaggggagagggggggagagggggtatataaaccaacgaaaagcgcgggaacggggatacggggcttgtgtggcacgacgtcgtggttgtgttactgggcaaacacttggggactgtaggtttctgtgggtgccgaccctaggcgctatggggattttgggttgggtcgggcttattgccgttggggttttgtgtgtgcgggggggcttgtcttcaaccgaatatgttattcggagtcgggtggctcgagaggtgggggatatattaaaggtgccttgtgtgccgctcccgtctgacgatcttgattggcgttacgagaccccctcggctataaactatgctttgatagacggtatatttttgcgttatcactgtcccggattggacacggtcttgtgggataggcatgcccagaaggcatattgggttaacccctttttatttgtggcgggttttctggaggacttgagtcaccccgcgtttcctgccaacacccaggaaacagaaacgcgcttggccctttataaagagatacgccaggcgctggacagtcgcaagcaggccgccagccacacacctgtgaaggctgggtgtgtgaactttgactattcgcgcacccgccgctgtgtagggcgacaggatttgggacctaccaacggaacgtctggacggaccccggttctgccgccggacgatgaagcgggcctgcaaccgaagcccctcaccacgccgccgcccatcatcgccacgtcggaccccaccccgcgacgggacgccgccacaaaaagcagacgccgacgaccccactcccggcgcctctaacgatgcctcgacggaaacccgtccgggttcggggggcgaaccggccgcctgtcgctcgtcagggccggcgggcgctcctcgccgccctagaggctgtcccgctggtgtgacgttttcctcgtccgcgccccccgaccctcccatggatttaacaaacgggggggtgtcgcctgcggcgacctcggcgcctctggactggaccacgtttcggcgtgtgtttctgatcgacgacgcgtggcggcccctgatggagcctgagctggcgaaccccttaaccgcccacctcctggccgaatataatcgtcggtgccagaccgaagaggtgctgccgccgcgggaggatgtgttttcgtggactcgttattgcacccccgacgaggtgcgcgtggttatcatcggccaggacccatatcaccaccccggccaggcgcacggacttgcgtttagcgtgcgcgcgaacgtgccgcctcccccgagtcttcggaatgtcttggtggccgtcaagaactgttatcccgaggcacggatgagcggccacggttgcctggaaaagtgggcgcgggacggcgtcctgttactaaacacgaccctgaccgtcaagcgcggggcggcggcgtcccactctagaatcggttgggaccgcttcgtgggcggagttatccgccggttggccgcgcgccgccccggcctggtgtttatgctctggggcgcacacgcccagaatgccatcaggccggaccctcgggtccattgcgtcctcaagttttcgcacccgtcgcccctctccaaggttccgttcggaacctgccagcatttcctcgtggcgaaccgatacctcgagacccggtcgatttcacccatcgactggtcggtttgaaaggcatcgacgtccggggtttttgtcggtgggggcttttgggtatttccgatgaataaagacggttaatggttaaacctctggtctcatacgggtcggtgatgtcgggcgtcgggggagagggagttccctctgcgcttgcgattctagcctcgtggggctggacgttcgacacgccaaaccacgagtcggggatatcgccagatacgactcccgcagattccattcggggggccgctgtggcctcacctaaccaacctttacacgggggcccggaacgggaggccacagcgccgtctttctccccaacgcgcgcggatgacggcccgccctgtaccgacgggccctacgtgacgtttgataccctgtttatggtgtcgtcgatcgacgaattagggcgtcgccagctcacggacaccatccgcaaggacctgcggttgtcgctggccaagtttagcattgcgtgcaccaagacctcctcgttttcgggaaacgccccgcgccaccacagacgcggggcgttccagcgcggcacgcgggcgccgcgcagcaacaaaagcctccagatgtttgtgttgtgcaaacgcgcccacgccgctcgagtgcgagagcagcttcgggtcgttattcagtcccgcaagccgcgcaagtattacacgcgatcttcggacgggcggctctgccccgccgtccccgtgttcgtccacgagttcgtctcgtccgagccaatgcgcctccaccgagataacgtcatgctggcctcgggggccgagtaaccgccccccccccatgccaccctcactgcccgtcgcgcgtgtttgatgttaataaataacacataaatttggctggttgtttgttgtctttaatggaccgcccgcaagggggggggggcgtttcagtgtcgggtgacgagcgcgatccggccgggatcctaggaccccaaaagtttgtctgcgtattccagggtggggctcagttgaatctcccgcagcacctctaccagcaggtccgcggtgggctggagaaactcggccgtcccggggcaggcggttgtcgggggtggaggcgcggcgcccaccccgtgtgccgcgcctggcgtctcctctgggggcgacccgtaaatggttgcagtgatgtaaatggtgtccgcggtccagaccacggtcaaaatgccggccgtggcgctccgggcgctttcgccgcgcgaggagctgacccaggagtcgaacggatacgcgtacatatgggcgtcccacccgcgttcgagcttctggttgctgtcccggcctataaagcggtaggcacaaaattcggcgcgacagtcgataatcaccaacagcccaatgggggtgtgctggataacaacgcctccgcgcggcaggcggtcctggcgctcccggccccgtaccatgatcgcgcgggtgccgtactcaaaaacatgcaccacctgcgcggcgtcgggcagtgcgctggtcagcgaggccctggcgtggcataggctatacgcgatggtcgtctgtggattggacatctcgcggtgggtagtgagtcccccgggccgggttcggtggaactgtaaggggacggcgggttaatagacaatgaccacgttcggatcgcgcagagccgatagtatgtgctcactaatgacgtcatcgcgctcgtggcgctcccggagcggatttaagttcatgcgaaggaattcggaggaggtggtgcgggacatggccacgtacgcgctgttgaggcgcaggttgccgggcgtaaagcagatggcgaccttgtccaggctaaggccctgggagcgcgtgatggtcatggcaagcttggagctgatgccgtagtcggcgtttatggccatggccagctccgtagagtcaatggactcgacaaactcgctgatgttggtgttgacgacggacatgaagccgtgttggtcccgcaagaccacgtaaggcaggggggcctcttccagtaactcggccacgttggccgtcgcgtgccgcctccgcagctcgtccgcaaaggcaaacacccgtgtgtacgtgtatcccatgagcgtataattgtccgtctgcagggcgacggacatcagccccccgcgcggcgagccggtcagcatctcgcagccccggaagataacgttgtccacgtacgtgctaaagggggcgacttcaaatgcctccccgaagagctcttggaggattcggaatctcccgaggaaggcccgcttcagcagcgcaaactgggtgtgaacggcggcggtggtctccggttccccgggggtgtagtggcagtaaaacacgtcgagctgttgttcgtccagccccgcgaaaataacgtcgaggtcgtcgtcgggaaaatcgtccgggcccccgtcccgcggccccagttgcttaaaatcaaacgcacgctcgccgggggcgcctgcgtcggccattaccgacgcctgcgtcggcacccccgaagatttggggcgcagagacagaatctccgccgttagttctcccatgcgggcgtacgcgagggtcctctgggtcgcatccaggcccgggcgctgcagaaagttgtaaaaggagataagcccgctaaatatgagccgcgacaggaacctgtaggcaaactccaccgaagtctccccctgagtctttacaaagctgtcgtcacgcaacactgcctcgaaggcccggaacgtcccactaaacccaaaaaccagttttcgcaggcgcgcggtcaccgcgatctggctgttgaggacgtaagtgacgtcgttgcgggccacgaccagctgctgtttgctgtgcacctcgcagcgcatgtgccccgcgtcctggtcctggctctgcgagtagttggtgatgcggctggcgttggccgtgagccacttttcaatagtcaggccgggctggtgtgtcagccgtcggtattcgtcaaactccttgaccgacacgaacgtaagcacggggagggtgaacacgacgaactccccctcacgggtcaccttcaggtaggcgtggagcttggccatgtacgcgctcacctctttgtgggaggagaacagccgcgtccagccggggaggttggcggggttggtgatgtagttttccgggacgacgaagcgatccacgaactgcatgtgctcctcggtgatgggcaggccgtactccagcaccttcatgaggttaccgaactcgtgctcgacgcaccgtttgttgttaataaaaatggcccagctatacgagaggcgggcgtactcgcgcagcgtgcggttgcagatgaggtacgtgagcacgttctcgctctggcggacggaacaccgcagtttctggtgctcgaaggtcgactccagggacgccgtctgcgtcggcgagcccacacacaccaacacgggccgcaggcgggccgcgtactggggggtgtggtacagggcgttaatcatccaccagcaatacaccacggccgtgaggaggtgacgcccaaggagcccggcctcgtcgatgacgatcacgttgctgcgggtaaaggccggcagcgccccgtgggtggccggggccaaccgcgtcagggcgccctcggccaaccccagggtccgttccagggcggccagggcgcgaaactcgttccgcaactcctcgcccccggaggcggccagggcgcgcttcgtgaggtccaaaatcacctcccagtagtacgtcagatctcgtcgctgcaggtcctccagcgaggcggggttgctggtcagggtgtacgggtactgtcccagttgggcctggacgtgattcccgcgaaacccaaattcatgaaagatggtgttgatgggtcggctgagaaaggcgcccgagagtttggcgtacatgttttgggccgcaatgcgcgtggcgcccgtcaccacacagtccaagacctcgttgattgtctgcacgcacgtgctctttccggagccagcgttgccggtgataagatacaccgcgaacggaaactccctgaggggcaggcctgcgggggactctaaggccgccacgtcccggaaccactgcagacggggcacttgcgctccgtcgagctgttgttgcgagagctctcggatgcgcttaaggattggctgcaccccgtgcatagacgtaaaatttaaaaaggcctcggccctccctggaacggctggtcggtccccgggttgctgaaggtgcggcgggccgggtttctgtccgtctagctggcgctccccgccggccgccgccatgaccgcaccacgctcgtgggcccccactacgcgtgcgcggggggacacggaagcgctgtgctcccccgaggacggctgggtaaaggttcaccccacccccggtacgatgctgttccgtgagattctccacgggcagctggggtataccgagggccagggggtgtacaacgtcgtccggtccagcgaggcgaccacccggcagctgcaggcggcgatctttcacgcgctcctcaacgccaccacttaccgggacctcgaggcggactggctcggccacgtggcggcccgcggtctgcagccccaacggctggttcgccggtacaggaacgcccgggaggcggatatcgccggggtggccgagcgggtgttcgacacgtggcggaacacgcttaggacgacgctgctggactttgcccacgggttggtcgcctgctttgcgccgggcggcccgagcggcccgtcaagcttccccaaatatatcgactggctgacgtgcctggggctggtccccatattacgcaagcgacaagaagggggtgtgacgcagggtctgagggcgtttctcaagcagcacccgctgacccgccagctggccacggtcgcggaggccgcggagcgcgccggccccgggttttttgagctggcgctggccttcgactccacgcgcgtggcggactacgaccgcgtgtatatctactacaaccaccgccggggcgactggctcgtgcgagaccccatcagcgggcagcgcggagaatgtctggtgctgtggccccccttgtggaccggggaccgtctggtcttcgattcgcccgtccagcggctgtttcccgagatcgtcgcgtgtcactccctccgggaacacgcgcacgtctgccggctgcgcaataccgcgtccgtcaaggtgctgctggggcgcaagagcgacagcgagcgcggggtggccggtgccgcgcgggtcgttaacaaggtgttgggggaggacgacgagaccaaggccgggtcggccgcctcgcgcctcgtgcggcttatcatcaacatgaagggcatgcgccacgtaggcgacattaacgacaccgtgcgtgcctacctcgacgaggccggggggcacctgatagacgccccggccgtcgacggtaccctccctggattcggcaagggcggaaacagccgcgggtctgcgggccaggaccagggggggcgggcgccgcagcttcgccaggccttccgcacggccgtggttaacaacatcaacggcgtgttggagggctatataaataacctgtttggaaccatcgagcgcctgcgcgagaccaacgcgggcctggcgacccaattgcaggagcgcgaccgcgagctccggcgcgcaacagcgggggccctggagcgccagcagcgcgcggccgacctggcggccgagtccgtgaccggtggatgcggcagccgccctgcgggggcggacctgctccgggccgactatgacattatcgacgtcagcaagtccatggacgacgacacgtacgtcgccaacagctttcagcacccgtacatcccttcgtacgcccaggacctggagcgcctgtcgcgcctctgggagcacgagctggtgcgctgttttaaaattctgtgtcaccgcaacaaccagggccaagagacgtcgatctcgtactccagcggggcgatcgccgcattcgtcgccccctactttgagtcagtgcttcgggccccccgggtaggcgcgcccatcacgggctccgatgtcatcctgggggaggaggagttatgggatgcggtgtttaagaaaacccgcctgcaaacgtacctgacagacatcgcggccctgttcgtcgcggacgtccagcacgcagcgctgcccccgcccccctccccggtcggcgccgatttccggcccggcgcgtccccgcggggccggtccagatcgcggtcgcccggaagaactgcgccaggcgcgccggaccagggcgggggcatcgggcaccgggatggccgccgcgacggccgacgatgaggggtcggccgccaccatcctcaagcaggccatcgccggggaccgcagcctggtcgaggcggccgaggcgattagccagcagacgctgctccgcctggcctgcgaggtgcgccaggtcggcgaccgccagccgcggtttaccgccaccagcatcgcgcgcgtcgacgtcgcgcctgggtgccggttgcggttcgttctggacgggagtcccgaggacgcctatgtgacgtcggaggattactttaagcgctgctgcggccagtccagttatcgcggcttcgcggtggcggtcctgacggccaacgaggaccacgtgcacagcctggccgtgccccccctcgttctgctgcaccggttctccctgttcaaccccagggacctcctggactttgagcttgcctgtctgctgatgtacctggagaactgcccccgaagccacgccaccccgtcgacctttgccaaggttctggcgtggctcggggtcgcgggtcgccgcacgtccccattcgaacgcgttcgctgccttttcctccgcagttgccactgggtcctaaacacactcatgttcatggtgcacgtaaaaccgttcgacgacgagttcgtcctgccccactggtacatggcccggtacctgctggccaacaacccgccccccgttctctcggccctgttctgtgccaccccgacgagctcctcattccggctgccggggccgcccccccgctccgactgcgtggcctataaccccgccgggatcatggggagctgctgggcgtcggaggaggtgcgcgcgcctctggtctattggtggctttcggagaccccaaaacgacagacgtcgtcgctgttttatcagttttgttgaattttaggaaataaacccggttttgtttctgtggcctcccgacggatgcgcgtgtccttcctccgtcttggtgggtgggtgtctgtgtatcgcgtcccatctgtgcggagagggggggcatgtcggcacgtattcggacagactcaagcacacacgggggagcgctcttgtctcagggcaatgtttttattggtcaaactcaggcaaacagaaacgacatcttgtcgtcaaagggatacacaaacttccccccctctccccatactcccgccagcaccccggtaaacaccaactcaatctcgcgcaggatttcgcgcaggtgatgagcgcagtccacgggggggagcacaaggggccgcgggtatagatcgacggggacgccgaccgactccccgcctccgggacagacacgcacgacgcgccgccagtagtgctctgcgtccagcaaggcgccgccgcggaaggcagtggggggcaaggggtcgctagcctcaaagggggacacccgaacgctccagtactccgcgtccaaccgtttattaaacgcgtccacgataaggcggtcgcaggcgtcctccataaggccccgggccgtgagtgcgtcctcctccggcacgcctgccgttgtcaggcccaggacccgtcgcagcgtgtcgcgtacgaccccggccgccgtggtgtacgcgggcccgcggagaggaaatcccccaagatggtcagtgttgtcgcgggagttccagaaccacactcccgcctggttccaggcgactgcgtgggtgtagacgccctcgagggccaggcacagtgggtgccgcagccggaggccgttggccctaagcacggctcccacggccgtctcgatggcccgccgggcgtcctcgatcaccccggaagccgcatccgcgtcttgggggtccacgttaaagacaccccagaacgcacccccatcgcccccgcagaccgcgaacttcaccgagctggccgtctcctcgatctgcaggcagacggcggccattaccccacccaggagctgccgcagcgcagggcaggcgtcgcacgtgtccgggaccaggcgctccaagacggccccggcccagggctctgagggagcggccaccaccagcgcgtccagtcttgctaggcccgtccggccgtgggggtccgccagcccgctccccccgaggtcggccagggccgccaggagctgggcgcgaagtccggggaagcaaaaccgcgccgtccagacgggcccgacggccgcgggcgggtctaacagttggatgattttagtggcgggatgccaccgcgccaccgcctcccgcaccgcgggcaggaggcatccggctgccgccgaggccacgccgggccaggctcgcggggggaggacgaccctggcccccaccgcgggccaggcccccaggagcgcggcgtaagcggccgcggccccgcgcaccaggtcccgtgccgactcggccgtggccggcacggtgaacgtgggccaacccggaaaccccaggacggcaaagtacgggacgggtcccccccggacctcaaactcgggccccagaaaggcaaagacgggggccagggccccgggggcggcgtggaccgtggtatgccactgccggaaaagggcgacgagcgccggcgcggagaacttctcgccggcgcttacaaagtagtcgtaatcgcggggcagcagcacccgtgccgtgactcgttgcgggtgcccgcgtggccgcaggcccacctcgcacacctcgaccaggtccccgaacgcgccctccttcttgatcggcggaaacgcaagagtctggtattcgcgcgcaaatagcgcggttccggtggtgatgttaacggtcagcgaagcggcggacgcgcactggggggtgtcgcgaatggccgccaggcgcgcccacgccagccgcgcgtcgggatgctcggcaacgcgcgccgccagggccatagggtcgatgtcaatgttggcctccgcgaccaggagagcggcgcgaggggcggcgggcgggccccacgacgctctctcaactttcaccaccagtcccgtgcgtgggtccgagccgatacgcagcggggcgaacagggccaccggcccggtctggcgctccagggccgccaggacgcacgcgtacagcgcccgccacagagtcgggttctccaggggctccagcggggaggcggccggcgtcgtcgcggcgcgggcggccgccacgacggcctggacggagacgtccgcggagccgtagaaatcccgcagctccgtcgcggtgacggagacctccgcaaagcgcgcgcgaccctcccctgcggcgttgcgacatacaaaatacaccagggcgtggaagtactcgcgagcgcgggggggcagccataccgcgtaaagggtaatggcgctgacgctctcctccacccacacgatatctgcggtgtccatcgcacggcccctaaggatcacgggcggtctgtgggtcccatgctgccgtgcctggccgggcccggtgggtcgcggaaaccggtgacggggggggggcggtttttggggttggggtgggggtgggaaacggcccgggtccgggggccaacttggcccctcggtgcgttccggcaacagcgccgccggtccgcggacgaccacgtaccgaacgagtgcggtcccgagacttatagggtgctaaagttcaccgccccctgcatcatgggccaggcctcggtggggagctccgacagcgccgcctccaggatgatgtcagcgttggggttggcgctggatgagtgcgtgcgcaaacagcgcccccacgcaggcacgcgtagcttgaagcgcgcgcccgcaaactcccgcttgtgggccataagcagggcgtacagctgcctgtgggtccggcaggcgctgtggtcgatgtggtgggcgtccaacaaccccacgattgtctgtttggtgaggtttttaacgcgccccgccccgggaaacgtctgcgtgcttttggccatctgcacgccaaacagttcgccccagattatcttgaacagcgccaccgcgtggtccgtctcgctaacggacccgcgcgggggacagccgcttagggcgtcggcgacgcgcttgacggcttcctccgagagcagaagtccgtcggttacgttacagtggcccagttcgaacaccagctgcatgtagcggtcgtagtggggggtcagtaggtccagcacgtcatcggggccgaaggtcctcccagatcccccggccgccgagtcccaatgcaggcgcgcggccatggtgctgcacaggcacaacagctcccagacgggggttacgttcagggtggggggcagggccacgagctccagctctccggtgacgttgatcgtggggatgacgcccgtggcgtagtggtcatagatccgccgaaatatggcgctgctgcgggtggccatgggaacgcggagacaggcctccagcaacgccaggtaaataaaccgcgtgcgtcccatcaggctgttgaggttgcgcatgagcgcgacaatttccgccggcgcgacatcggaccggaggtatttttcgacgaaaagacccacctcctccgtctcggcggcctgggccggcagcgacgcctcgggatcccggcaccgcagctcccgtagatcgcgctgggccctgagggcgtcgaaatgtacgccccgcaaaaacagacagaagtcctttggggtcagggtatcgtcgtgtccccagaagcgcacgcgtatgcagtttagggtcagcagcatgtgaaggatgttaaggctgtccgagagacacgccagcgtgcatctctcaaagtagtgtttgtaacggaatttgttgtagatgcgcgacccccgccccagcgacgtgtcgcatgccgacgcgtcacagcgccccttgaaccggcgacacagcaggtttgtgacctgggagaactgcgcgggccactggccgcaggaactgaccacgtgattaaggagcatgggcgtaaagacgggctccgagcgcgccccggagccgtccatgtaaatcagtagctcccccttgcggagggtgcgcacccgtcccagggactggtacacggacaccatgtccggtccgtagttcatgggttttacgtaggcgaacatgccatcaaagtgcaggggatcgaagctgaggcccacggttacgaccgtcgtgtatataaccacgcggtattggccccacgtggtcacgtccccgaggggggtgagcgagtgaagcaacagcacgcggtccgtaaactgacggcagaaccgggccacgatctccgcgaaggagaccgtcgacgaaaaaatgcagatgttatcgcccccgccaaggcgcgcttccagctccccaaagaacgtggccccccgggcgtccggagaggcgtccggagacgggccgctcggcggcccgggcgggcgcagggcagcctgcaggagctcggtccccagacgcgggagaaacaggcaccggcgcgccgaaaacccgggcatggcgtactcgccgaccaccacatgcacgtttttttcgccccggagaccgcacaggaagtccaccaactgcgcgttggcggttgcgtccatggcgatgatccgaggacaggtgcgcagcaggcgtagcattaacgcatccacgcggcccagttgctgcatcgttggcgaatagagctggcccagcgtcgacataacctcgtccagaacgaggacgtcgtagttgttcagaaggttggggcccacgcgatgaaggctttccacctggacgataagtcggtggaaggggcggtcgttcataatgtaattggtggatgagaagtaggtgacaaagtcgaccaggcctgactcagcgaaccgcgtcgccagggtctgggtaaaactccgacgacaggagacgacgagcacactcgtgtccggagagtggatcgcttcccgcagccagcggatcagcgcggtagtttttcccgaccccattggcgcgcggaccacagtcacgcacctggccgtcggggcgctcgcgttggggaaggtgacgggtccgtgctgctgccgctcgatcgttgttttcgggtgaacccggggcacccattcggccaaatcccccccgtacaacatccgcgctagcgatacgctcgacgtgtactgttcgcactcgtcgtccccaatgggacgcccggcccccagaggatctcccgactccgcgccccccacgaaaggcatgaccggggcgcggacggcgtggtgggtctggtgtgtgcaggtggcgacgtttgtggtctctgcggtctgcgtcacggggctcctcgtcctggcctctgtgttccgggcacggtttccctgcttttacgccacggcgagctcttatgccggggtgaactccacggccgaggtgcgcgggggtgtagccgtgcccctcaggttggacacgcagagccttgtgggcacttatgtaatcacggccgtgttgttgttggccgcggccgtgtatgccgtggtcggcgccgtgacctcccgctacgaccgcgccctggacgcgggccgccgtctggctgcggcccgcatggccatgccgcacgccacgctgatcgccggaaacgtctgctcttggttgctgcagatcaccgtcctgttgctggcccatcgcaccagccagctggcccacctggtttacgtcctgcactttgcgtgtctggtgtattttgcggcccatttttgcaccaggggggtcctgagcgggacgtatctgcgtcaggtgcacggcctgatggagccggccccgactcatcatcgcgtcgttggcccggctcgagccgtgctgacaaacgccttgctgttgggcgtcttcctgtgcacggccgacgccgcggtatccctgaataccatcgccgcgttcaactttaatttttcggccccgggcatgctcatatgcctgaccgtgctgttcgcccttctcgtcgtatcgctgttgttggtggtcgagggggtgttgtgtcactacgtgcgcgtgttggtgggcccccacctgggggccgtggccgccacgggcatcgtcggcctggcatgcgagcactattacaccaacggctactacgttgtggagacgcagtggccgggggcccagacgggagtccgcgtcgccctcgccctggtcgccgcctttgccctcggcatggccgtgctccgctgcacccgcgcctatctgtatcacaggcggcaccacaccaaattttttatgcgcatgcgcgacacgcgacaccgcgcacattccgccctcaagcgcgtacgcagttccatgcgcggatcgcgagacggccgccacaggcccgcacccggcagcccgcccgggattcccgaatatgcggaagacccctacgcgatctcatacggcggccagctcgaccggtacggagattccgacggggagccgatttacgacgaggtggcggacgaccaaaccgacgtattgtacgccaagatacaacacccgcggcacctgcccgacgacgagcccatctatgacaccgttggggggtacgaccccgagcccgccgaggaccccgtgtacagcaccgtccgccgttggtagctgtttggttccgttttaataaaccgtttgtgtttaacccgaccgtggtgtatgtctggtgtgtggcgtccgatcccgttactatcaccgttccccccaaaccccggcgattgtgggtttttttaaaaacgacacgcgtgcgaccgtatacagaacattgttgttttttattcgctatcggacatggggggtggaaactgggtggcggggcaggcgcctccgggggttcgccggtgagtgtggcgcgaggggggatccgacgaacgcaggcgctgtctccccggggcccgcgtaaccccgcgcatatccgggggcacgtagaaattaccttcctcttcggactcgatatccacgacgtcaaagtcgtgggcggtcagcgagacgacctccccgtcgtcggtgatgaggacgttgtttcggcagcagcagggccgggtcccggagaacgagaggcccatagctcggcgagcgtgtcgtcgaacgccaggcggctgcttcgctgtatggccttatagatctccggatcgatgcggacgggggtaatgatcagggcgatcggaacggcctggttcgggagaatggacgccttgctgggtcctgcggccccgagagccccggcgccgtcctccaggcggaacgttacgccctcctccgcgctagtgcggtgcctgccgataaacgtcaccagatgcgggtggggggggcagtcggggaagtggctgtcgagcacgtagccctgcaccaagatctgcttaaagttcgggtgacgggggttcgcgaagacgggctcgcggcgtaccagatccccggagctccaggacacgggggagatggtgtggcgtccgaggtcgggggcgccaaacagaagcacctccgagacaacgccgctatttaactccaccaaggcccgatccgcggcggagcaccgccttttttcgcccgaggcgtgggcctctgaccaggcctggtcttgcgtgacgagagcctcctccgggccggggacgcgcccgggcgcgaagtatcgcacgctgggcttcgggatcgaccggataaatgcccggaacgcctccggggaccggtgtgccatcaagtcctcgtacgcggaggccgtggggtcgctggggtccatggggtcgaaagcgtacttggcccggcatttgacctcgtaaaaggccaggggggtcttggggactggggccaagtagccgtgaatgtcccgaggacagacgagaatatccagggacgccccgaccatccccgtgtgaccgtccatgaggaccccacacgtatgcacgttctcttcggcgaggtcgccgggttcgtggaagataaagcgccgcgtgtcggcgccggcctcgccgccgtcgtccgcgcggcccacgcagtagcgaaacagcaggcttcgggccgtcggctcgttcacccgcccgaacatcaccgccgaagactgtacatccggccgcaggctggcgttgtgcttcagccactggggcgagaaacacggaccctgggggccccagcggagggtggatgcggtcgtgaggccccgccggagcagggcccatagctggcagtcggcctggttttgcgtggccgcctcgtaaaaccccatgaggggccggggcgccacggcgtccgcggcggccgggggcccgcggcgcgtcaggcgccataggtgccggccgagtccgcggtccaccatacccgcctcctcgaggaccacggccagggaacacagataatccaggcgggcccagaggggaccgatggccagaggggcgcggacgccgcgcagcaacccgcgcaggtggcgctcgaacgtctcggctagtatatgggagggcagcgcgttggggatcaccgacgccgaccacatagagtcaaggtccggggagtcgggatcggcgtccgggtcgcgggcgtgggtgcccccaggagatagcggaatgtctggggtcggaggccctgaggcgtcagaaagtgccggcgacgcggcccggggcttttcgtctgcggtgtcggtggcgtgctgatcacgtggggggttaacgggcgaatgggagctcgggtccacagctgacgtcgtctggggtggggggggcaggggacggaaggtggttgttagcggaagactgttagggcgggggcgcttgggggggctgtcggggccacgaggggtgtcctcggccagggcccaggaacgcttagtcacggtgcgtcccggcggacatgctgggcctcccgtggactccatttccgagacgacgtggggggagcggtggttgagcgcgccgccgggtgaacgctgattctcacgacagcgcgtgccgcgcgcacgggttggtgtgacacaggcgggacaccagcaccaggagaggcttaagctcgggaggcagcgccaccgacgacagtatcgccttgtgtgtgtgctggtaatttatacaccgatccgtaaacgcgcgccgaatcttgggattgcggaggtggcgccggatgccctctgggacgtcatacgccaggccgtgggtgttggtctcggccgagttgacaaacagggctgggtgcagcacgcggcgataggcgagcagggccagggcgaagtccagcgacagctggttgttgaaatactggtaaccgggaaaccgggtcacgggtacgcccaggctcggggcgacgtacacgctaaccaccaactccagcagcgtctggccaagggcgtacaggtcaaccgctaacccgacgtcgtgcttcaggcggtggttggtaaattcggcccgttcgttgttaaggtatttcaccaacagctccgggggctggttatacccgtgacccaccagggtgtgaaagttggctgtggttagggcggtgggcatgccaaacatccggggggacttgaggtccggctcctggaggcaaaactgcccccgggcgatcgtggagttggagttgagggtgacgaggctaaagtcggcgaggacggcccgccggagcgagacggcgtccgaccgcagcatgacgaggatgttggcgcacttgatatccaggtggctgatcccgcaggtggtgtttaaaaacacaacggcgcgggccagctccgtgaagcactggtggagggccgtcgagaccgaggggtttgttgtgcgcagggacgccagttggccgatatacttaccgaggtccatgtcgtacgcggggaacactatctgtcgttgttgcagcgagaacccgaggggcgcgatgaagccgcggatgttgtgggtgcggccggcgcgtagagcgcactccccgaccaacagggtcgcgatgagctcaacggcaaaccactccttttcctttatggtcttaacggcaagcttatgttcgcgaatcagttggacgtcgccgtatcccccagaccccccgaagcttcgggccccggggatctcgagggtcgtgtagtgtagggcggggttgatggcgaacacggggctgcatagcttgcggatgcgcgtgagggtaaggatgtgcgagggggacgaggggggtgcggttaacgccgcctgggatctgcgcaggggcgggcggttcagtttggccgccgtaccgggcgtctcgggggacgcgcggcgatgagacgagcggctcattcgccatcgggatagtcccgcgcgaagccgctcgcggaggccggatcggtggcgggacccgtgggaggagcgggagccggcggcgtcctggagagaggggccgctggggcgcccggaggccccgtgtgggttggagtgtatgtaggatgcgagccaatccttgaaggactgttggcgtgcaccttgggggctgaggttagctgccacatgaccagcaggtcgctgtctgcgggactcatccatccttcggccaggtcgccgtcttcccacagagaagcgttggtcgctgcttcctcgagttgctcctcctggtccgcaagacgatcgtccacggcgtccaggcgctcaccaagcgccggatcgaggtaccgtcggtgtgcggttagaaagtcacgacgcgccgcttgctcctccacgcgaattttaacacaggtcgcgcgctgtcgcatcatctctaagcgcgcgcgggactttagccgcgcctccaattccaagtgggccgcctttgcagccataaaggcgccaacaaaccgaggatcttgggtgctgacgccctcccggtgcagctgcagggtctggtccttgtaaatctcggctcggaggtgcgtctcggccaggcgtcggcgcagggccgcgtgggcggcatctcggtccattccgccaccctgcgggcgacccggggggtgctctgatagtctcgcgtgcccaaggcccgtgatcggggtacttcgccgccgcgacccgccacccggtgtgcgcgatgtttggtcagcagctggcgtccgacgtccagcagtacctggagcgcctcgagaaacagaggcaacttaaggtgggcgcggacgaggcgtcggcgggcctcacaatgggcggcgatgccctacgagtgccctttttagatttcgcgaccgcgacccccaagcgccaccagaccgtggtcccgggcgtcgggacgctccacgactgctgcgagcactcgccgctcttctcggccgtggcgcggcggctgctgtttaatagcctggtgccggcgcaactaaaggggcgtgatttcgggggcgaccacacggccaagctggaattcctggcccccgagttggtacgggcggtggcgcgactgcggtttaaggagtgcgcgccggcggacgtggtgcctcagcgtaacgcctactatagcgttctgaacacgtttcaggccctccaccgctccgaagcctttcgccagctggtgcactttgtgcgggactttgcccagctgcttaaaacctccttccgggcctccagcctcacggagaccacgggccccccaaaaaaacgggccaaggtggacgtggccacccacggccggacgtacggcacgctggagctgttccaaaaaatgatccttatgcacgccacctactttctggccgccgtgctcctcggggaccacgcggagcaggtcaacacgttcctgcgtctcgtgtttgagatccccctgtttagcgacgcggccgtgcgccacttccgccagcgcgccaccgtgtttctcgtcccccggcgccacggcaagacctggtttctagtgcccctcatcgcgctgtcgctggcctcctttcgggggatcaagatcggctacacggcgcacatccgcaaggcgaccgagccggtgtttgaggagatcgacgcctgcctgcggggctggttcggttcggcccgagtggaccacgttaaaggggaaaccatctccttctcgtttccggacgggtcgcgcagtaccatcgtgtttgcctccagccacaacacaaacgtaagtcctcttttctttcgcatggctctcccaaggggccccgggtcgacccgacccacacccacccacccacccacatacacacacaaccagacgcgggaggaaagtctgccccgtgggcactgatttttattcgggatcgcttgaggaggcccgggcaacggcccgggcaacggtggggcaactcgtagcaaataggcgactgatgtacgaagagaagacacacaggcgccacccggcgctggtcggggggatgttgtccgcgccgcaccgtcccccgacgacctcttgcagacggtccgtgatgcaaggacggcggggggcctgcagcagggtgaccgtatccacgggatggccaaagagaagcggacacaggctagcatccccctggaccgccagggtacactgggccatcttggcccacagacacggggcgacgcagggacaggactccgttacgacggaggagagccacagtgcgttggcggaatcgatgtggggcggcggggcgcaggactcgcagccccccgggtggttggtgatcctggccaggagccatcccagatggcgggccctgcttcccggtggacagagcgaccccaggtcgctgtccatggcccagcagtagatctggccgctggggaggtgccaccaggcccccgggcccaaggcgcaacacgcgcccggctccgggggggtcttcgcggggaccagatacgcgccatccagctcgccgaccactggctcctccgcgagctgttcggtggttgggtcgggggtttcctccgggggggtggccgcccgtatgcgggcgaacgtgagggtgcacaggagcggggtcagggggtgcgtcacgctccggaggtggacgatcgcgcagtagcggcgctcgcggttaaagaaaaagagggcaaagaaggtgttcgggggcaaccgcagcgccttggggcgcgtcagatacagaaaaatctcgcagaagagggcgcgcccggggtctgggttaggaagggccacctgacacagaggctcggtgaggaccgttagacaccgaaagatcttgagccgctcgtccgcccgaacgacgcgccacacaaagacggagttgacaatgcgcgcgatagagtcgacgtccgtccccaggtcgtcgactctgtcgcgcgtgccgcgagctccggcccgggaatccggccggggcaaggtccccgggggaccaggcggcgccaggggccgccggggtcccagctgcgccatgccgggggcggggggagggcaaaccccagaggcgggggccaacggcgcggggaggagtgggtgggcgaggtggccgggggaaggcgcccgctagcgagaacggccgttcccggacgacaccttgcgacaaaacctaaggacagcggcccgcgcgacggggtccgagaggctaaggtaggccgcgatgttaatggtgaacgcaaagccgccgggaaagacaactatgccacagaggcggcgattaaaccccaggcagaggtaggcgtagctttccccgggcaggtattgctcgcagaccctgcgtggggctgtggaggggacggcctccatgaagcgacatttactctgctcgcgtttactgacgtcaccatccatcgccacggcgattggacgattgttaagccgcagcgtgtctccgcttgtgctgtagtagtcaaaaacgtaatggccgtcggagtcggcaaagcgggccgggaggtcgtcgccgagcgggacgacccgccgcccccgaccgccccgtccccccaggtgtgccaggacggccagggcatacgcggtgtgaaaaaaggcgtcgggggcggtcccctcgacggcgcgcatcaggttctcgaggagaatggggaagcgcctggtcacctcccccagccacgcgcgttggtcggggccaaagtcatagcgcaggcgctgtgagattcgagggccgccctgaagcgcggcccggatggcctggcccagggcccggaggcacgccagatgtatgcgcgcagtaaaggcgacctcggcggcgatgtcaaagggcggcaggacggggcgcgggtggcgcaggggcacctcgagcgcgggaaagcggagcagcagctccgcctgcccagcgggagacagctggtgggggcgcacgacgcgttctgcggcgcaggcctcggtcagggccgtggccagcgccgaggacagcagcggagggcgggcgcgtcgcccgccccacgccacggagttctcgtaggagacgacgacgaagcgctgcttggttccgtagtggtggcgcaggaccacggagatagaacgacggctccacagccagtccggccggtcgccgccggccagggcttcccatccgcgatccaaccactcgaccagcgaccgcggctttgcggtaccaggggtcagggttagaacgtcgttcaggatgtcctcgcccccgggcccgtggggcactggggccacaaagcggcccccgcctgggggctccagacccgccaacaccgcatctgcgtcagccgcccccatggcgcccccgctgacggcctggtgaaccagggcgccctggcggagccccgatgcaacgccacaggccgcacgcccggtccgagcgcggaccgggtggcggcgggtgacgtcctgcactgcccgctgaaccaacgcgaggatctcctcgttctcctgcgcgatggacacgtcctgggccgcggtcgtgtcgccgccgggggccgtcagctgctcctccggggagatgggggggtcggacgccccgacgatgggcgggtctgcgggcgcccccgcgtggggccgggccaagggctgcggacgcggggacgcgctttcccccagacccatggacaggtgggccgcagcctccttcgcggccggcggggcggcggcgccaagcagagcgacgtagcggcacaaatgccgacagacgcgcatgatgcgcgtgctgtcggccgcgtagcgcgtgttgggggggacgagctcgtcgtaactaaacagaatcacgcgggcacagctcgcccccgagccccacgcaaggcgcagcgccgccacggcgtacgggtcatagacgccctgtgcgtcacacaccacgggcaaggagacgaacaaccccccggcgctggacgcacgcggaaggaggccagggtgtgccggcacgacgggggccagaagctcccccaccgcatccgcgggcacgtaggcggcaaacgccgtgcaccacggggtacagtcgccggtggcatgagcccgagtctggatttcgacctggaagtttgcggccgtcccgagtccggggcggccgcgcatcagggcggccagagggattcccgcggccgccaggcactcgctggatatgatgacgtgaaccaaagacgagggccgacccgggacgtggccgagatcgtactggacctcgttggccaagtgcgcgttcatggttcgggggtgggtgtgggtgtgtaggcgatgcgggtcccccgagtccgcgggaagggcgcgggtttggcgcgcgtatgcgtattcgccaacggaggcgtgcgtgcttatgcgcggcgcgtttcttctgtctccagggaatccgaggccaggactttaacctgctctttgtcgacgaggccaactttattcgcccggatgcggtccagacgattatgggctttctcaaccaggccaactgcaagattatcttcgtgtcgtccaccaacaccgggaaggccagtacgagctttttgtacaacctccgcggggccgccgacgagcttctcaacgtggtgacctatatatgcgatgatcacatgccgcgggtggtgacgcacacaaacgccacggcctgttcttgttatatcctcaacaagcccgttttcatcacgatggacggggcggttcgccggaccgccgatttgtttctggccgattccttcatgcaggagatcatcgggggccaggccagggagaccggcgacgaccggcccgttctgaccaagtctgcgggggagcggtttctgttgtaccgcccctcgaccaccaccaacagcggcctcatggcccccgatttgtacgtgtacgtggatcccgcgttcacggccaacacccgagcctccgggaccggcgtcgctgtcgtcgggcggtaccgcgacgattatatcatcttcgccctggagcacttttttctccgcgcgctcacgggctcggcccccgccgacatcgcccgctgcgtcgtccacagtctgacgcaggtcctggccctgcatcccggggcgtttcgcggcgtccgggtggcggtcgagggaaatagcagccaggactcggccgtcgccatcgccacgcacgtgcacacagagatgcaccgcctactggcctcggagggggccgacgcgggctcgggccccgagcttctcttctaccactgcgagcctcccgggagcgcggtgctgtacccctttttcctgctcaacaaacagaagacgcccgcctttgaacactttattaaaaagtttaactccgggggcgtcatggcctcccaggagatcgtttccgcgacggtgcgcctgcagaccgacccggtcgagtatctgctcgagcagctgaataacctcaccgaaaccgtctcccccaacacggacgtccgtacgtattccggaaaacggaacggcgcctcggatgaccttatggtcgccgtcattatggccatctaccttgcggcccaggccggacctccgcacacattcgctcccatcacacgcgtttcgtgagcgcccaataaacacacccaggtatgctacgcacgaccacggtgtcgcctgttaagggggggggaagggggtgttggcgggaagcgtgggaacacgggggattctctcacgaccggcaccagtaccacccccctgtgaacacagaaaccccaacccaaatcccataaacatacgacacacaggcatattttggaatttcttaggtttttatttatttaggtatgctggggtttctccctggatgcccacccccccccccccccgtgggtctagccgggccttagggatagcgtataacgggggccatgtctccggaccgcacaacggccgcgccgtcaaaggtgcacacccgaaccacgggagccagggccaaggtgtctcctagttggcccgcgtgggtcagccaggcgacgagcgcctcgtagagcggcagccttcgctctccatcctgcatcagggccggggcttcggggtgaatgagctgggcggcctcccgcgtgacactctgcatctgcaggagagcgttcacgtacccgtcctgggcacttagcgcaaagagccgggggattagcgtaaggatgatggtggttccctccgtgatcgagtaaaccatgttaaggaccagcgatcgcagctcggcgtttacggggccgagttgttggacgtccgccagcagcgagaggcgactcccgttgtagtacagcacgttgaggtctggcagccctccggggtttctggggctggggttcaggtcccggatgcccctggccacgagccgcgccacgatttcgcgcgccaggggcgatggaagcggaacgggaaaccgcaacgtgaggtccagcgaatccaggcgcacgtccgtcgcttggccctcgaacacgggcgggacgaggctgatggggtccccgttacagagatctacgggggaggtgttgcgaaggttaacggtgccggcgtgggtgaggcccacgtccagggggcaggcgacgattcgcgtgggaagcacccgggtgatgaccgcggggaagcgccttcggtacgccagcaacagccccaacgtgtcgggactgacgcctccggagacgaaggattcgtgcgccacgtcggccagcgtcagttgccggcggatggtcggcaggaataccacccgcccttcgcagcgctgcagcgccgccgcatcggggcgcgagatgcccgagggtatcgcgatgtcagtttcaaagccgtccgccagcatggcgccgatccacgcggcagggagtgcagtggtggttcgggtggcgggaggagcgcggtgggggtcagcggcgtagcagagacgggcgaccaacctcgcataggacggggggtgggtcttagggggttgggaggcgacagggaccccagagcatgcgcggggaggtctgtcgggcccagacgcaccgagagcgaatccgtccatggagtcccggcctgggttttatggggcccggccctcggaatcgcggcttgtcggcggggacaaagggggcggggctagggggcttgcggaaacagaagacgtgtgggataaaagaatcgcactaccccaaggaagggcggggcggtttattacagagccagtcccttgagcggggatgcgtcatagacgagatactgcgcgaagtgggtctcccgcgcgtgggcttccccgttgcgggcgctgcggaggagggcggggtcgctggcgcaggtgagcgggtaggcctcctgaaacaggccacacgggtcctccacgagttcgcggcaccccggggggcgcttaaactgtacgtcgctggcggcggtggccgtggacaccgccgaacccgtctccacgatcaggcgctccaggcagcgatgtttggcggcgatgtcggccgacgtaaagaacttaaagcaggggctgagcaccggcgaggccccgttgaggtggtaggccccgttatagagcaggtccccgtacgaaaatcgctgcgacgcccacgggttggccgtggccgcgaaggcccgggacgggtcgctctggccgtggtcgtacatgagggcggtgacatccccctccttgtcccccgcgtaaacgcccccggcggcgcgtccccgggggttgcagggccggcggaagtagttgacgtcggtcgacacgggggtggcgataaactcacacacggcgtcctggccgtggtccatccctgcgcgccgcggcacctgggcgcacccgaacacggggacgggctgggccggccccaggcggtttcccgccacgaccgcgttccgcaggtacacggctgccgcgttgtccagtagagggggagccccgcggcccaggtaaaagttttggggaaggttgcccatgtcggtgacggggttgcggacggttgccgtggccacgacggcggtgtagcccacgcccaggtccacgttcccgcgcggctgggtgagcgtgaagtttacccccccgccagtttcatgccgggccacctggagctggcccaggaagtacgcctccgacgcgcgctccgagaacagcacgttctcagtcacaaagcggtcctgtcggacgacggtgaacccaaacccgggatggaggcccgtcttgagctgatgatgcaaggccacgggactgatcttgaagtaccccgccatgagcgcgtaggtcagcgcgttctccccggccgcgctctcgcggacgtgctgcacgacgggctgtcggatcgacgaaaagtagttggcccccagagccggggggaccagggggacctgccgcgacaggtcgcgcagggccggggggaaattgggcgcgttcgccacgtggtcggccccggcgaacagcgcgtggacggggagggggtaaaaatagtcgccattttggatggtatggtccagatgctggggggccatcagcaggattccggcgtgcaacgccccgtcgaatatgcgcatgttggtggtggacgcggtgttggcgcccgcgtcgggcgccgccgagcagagcagcgccgttgtgcgttcggccatgttgtgggccagcacctgcagcgtgagcatggcgggcccgtccactaccacgcgcccgttgtgaaacatggcgttgaccgtgttggccaccagattggccgggtgcagggggtgcgcggggtccgtcacggggtcgctggggcaatcctcgccgggggtgatctccgggaccaccatgttctgcagggtggcgtatacgcggtcgaagcgaacccccgcggtgcagcagcggccccgcgagaaggcgggcaccatcacgtagtagtaaatcttgtggtgcacggtccagtccgccccccggtgcggccggtcgtccgcggcgtccgcggctcgggcctgggtgttgtgcagcagctggccgtcgttgcggttgaagtccgcggtcgccacgttacacgccgctgcgtacacggggtcgtggccccccgcgctaacccggcagtcgcgatggcggtccagggccgcgcgccgcatcagggcgtcgcagtcccacacgaggggtggcagcagcgccgggtctcgcattaggtgattcagttcggcttgcgcctgcccgcccagttccgggccggtcagggtaaagtcatcaaccagctgggccagggcctcgacgtgcgccaccaggtcccggtacacggccatgcactcctcgggaaggtctcccccgaggtaggtcacgacgtacgagaccagcgagtagtcgttcacgaacgccgcgcaccgcgtgttgttccagtagctggtgatgcactggaccacgagccgggccagggcgcagaagacgtgctcgctgccgtgtatggcggcctgcagcaggtaaaacaccgccgggtagttgcggtcttcgaacgccccgcgaacggcggcgatggtggcgggggccatggcgtggcgtcccacccccagctccaggccccgggcgtcccggaacgccgccggacatagcgccaggggcaagttgccgttcaccacgcgccaggtggcctggatctcccccgggccggccgggggaacgtccccccccggcagctccacgtcggccacccccacgaagaagtcgaacgcggggtgcagctcaagagccaggttggcgttgtcgggctgcataaactgctccggggtcatctggccttccgcgacccatcggacccgcccgtgggccaggcgctgcccccaggcgttcaaaaacagctgctgcatgtctgcggcggggccggccggggccgccacgtacgccccgtacggattggcggcttcgacggggtcgcggttaaggcccccgaccgccgcgtcaacgttcatcagcgaagggtggcacacggtcccgatcgcgtgttccagagacaggcgcagcacctggcggtccttcccccaaaaaaacagctggcggggcgggaaggcgcggggatccgggtggccgggggcggggactaggtccccggcgtgcgcggcaaaccgttccatgaccggattgaacaggcccaggggcaggacgaacgtcaggtccatggcgcccaccagggggtagggaacgttggtggcggcgtagatgcgcttctccagggcctccaaaaagatcagcttctcgccgatggacaccagatccgcgcgcacgcgcgtcgtctggggggcgctctcgagctcgtccagcgtctgccggttcaggtcgagctgctcctcctgcatctccagcaggtggcggcccacgtcgtccagacttcgcacggccttgcccatcacgagcgccgtgaccaggttggccccgttcaggaccatctcgccgtacgtcaccggcacgtcggcttcggtgtcctccactttcaggaaggactgcaggaggcgctgtttgatcggggcggtggtgacgagcaccccgtcgaccggacgcccgcgcgtgtcggcatgcgtcagacggggcacggccacggagggctgcgtggccgtggtgaggtccacgagccaggcctcgacggcctcccggcggtggcccgccttgcccaggaaaaagctcgtctcgcagaagcttcgctttagctcggcgaccagggtcgcccgggccaccctggtggccaggcggccgttgtccaggtatcgttgcatcggcaacaacaaagccaggggcggcgccttttccagcagcacgtgcagcatctggtcggccgtgccgcgctcaaacgccccgaggacggcctggacgttgcgagcgagctgttggatggcgcgcaactggcgatgcgcgctgatacccgtcccgtccagggcctcccccgtgagcagggcgatggcctcggtggccaggctgaaggcggcgttcagggcccggcggtcgataatcttggtcatgtaattgtgtgtgggttgctcgatggggtgcgggccgtcgcgggcaatcagcggctggtggacctcgaactgtacgcgcccctcgttcatgtaggccagctccggaaacttggtacacacgcacgccaccgacaacccgagctccagaaagcgcacgagcgacagggtgttgcaatacgaccccaacagggcgtcgaactcgacgtcatacaggctgtttgcatcggagcgcacgcgggaaaaaaaatcgaacaggcgtcgatgcgacgccacctcgatcgtgctaaggagggacccggtcggcaccatggccgcggcataccggtatcccggagggtcgcggttgggagcggccatggggtcgcgtggagatcggctgtctctagcgatattggcccggggaggctaagatccaccccaacgcccggccacccgtgtacgtgcccgacggcccaaggtccaccgaaagacacgacgggcccggacccaaaaaggcgggggatgctgtgtgagaggccgggtgtcggtcgggggggaaaggcaccgggagaaggctgcggcctcgttccaggagaacccagtgtccccaacagacccggggacgtgggatcccaggccttatataccccccccgccccacccccgttagaacgcgacgggtgcattcaagatggccctggtccaaaagcgtgccaggaagaaattggcagaggcggcaaagctgtccgccgccgccacccacatcgaggccccggccgcgcaggctatccccagggcccgtgtgcgcaggggatcggtgggcggcagcatttggttggtggcgataaagtggaaaagcccgtccggactgaaggtctcgtgggcggcggcgaacaaggcacacagggccgtgcctcccaaaaacacggacatcccccaaaacacgggcgccgacaacggcagacgatccctcttgatgttaacgtacaggaggagcgcccgcaccgcccacgtaacgtagtagccgacgatggcggccaggatacaggccggcgccaccacccttccggtcagcccgtaatacatgcccgctgccaccatctccaacggcttcaggaccaaaaacgaccaaaggaacagaatcacgcgctttgaaaagaccggctgggtatggggcggaagacgcgagtatgccgaactgacaaaaaagtcagaggtgccgtacgaggacaatgaaaactgttcctccagtggcagttctccctcctcccccccaaaggcggcctcgtcgaccagatctcgatccaccagaggaaggtcatcccgcatggtcatggggtgtgcggtggaggtggggagaccgaaaccgcaaagggtcgcttacgtcagcaggatcccgagatcaaagacacccgggttcttgcacaaacaccacccgggttgcatccgcggaggcgagtgttttgataaggccgttccgcgccttgatataacctttgatgttgaccacaaaacccggaatttacgcctacgccccaatgcccacgcaagatgaggtaggtaaccccccccccgtgggtgtgacgttgcgtttagttcattggaggccaaggggaaaatggggtggggaggaaacggaaaacccagtaggccgtgttgggaacacgcccggggttgtcctcaaaaggcagggtccatactacggaagccgtcgttgtattcgagacctgcctgtgcgacgcacgtcggggttgcctgtgtccggttcggccccaccgcgtgcggcacgcacgaggacgagtccgcgtgctttattggcgttccaagcgttgccctccagtttctgttgtcggtgttcccccatacccacgcccacatccaccgtagggggcctctgggccgtgtcacgtcgccgcccgcgatggagcttagctacgccaccaccatgcactaccgggacgttgtgttttacgtcacaacggaccgaaaccgggcctactttgtgtgcggggggtgtgtttattccgtggggcggccgtgtgcctcgcagcccggggagattgccaagtttggtctggtcgttcgagggacaggcccagacgaccgcgtggtcgccaactatgtacgaagcgagctccgacaacgcggcctgcaggacgtgcgtcccattggggaggacgaggtgtttctggacagcgtgtgtcttctaaacccgaacgtgagctccgagctggatgtgattaacacgaacgacgtggaagtgctggacgaatgtctggccgagtactgcacctcgctgcgaaccagcccgggtgtgctaatatccgggctgcgcgtgcgggcgcaggacagaatcatcgagttgtttgaacacccaacgatagtcaacgtttcctcgcactttgtgtataccccgtccccatacgtgttcgccctggcccaggcgcacctcccccggctcccgagctcgctggaggccctggtgagcggcctgtttgacggcatccccgccccacgccagccacttgacgcccacaacccgcgcacggatgtggttatcacgggccgccgcgccccacgacccatcgccgggtcgggggcggggtcggggggcgcgggcgccaagcgggccaccgtcagcgagttcgtgcaagtcaaacacattgaccgcgtgggccccgctggcgtttcgccggcgcctccgccaaacaacaccgactcaagttccctggtgcccggggcccaggattccgccccgcccggccccacgctaagggagctgtggtgggtgttttatgccgcagaccgggcgctggaggagccccgcgccgactctggcctcacccgcgaggaggtacgtgccgtacgtgggttccgggagcaggcgtggaaactgtttggctccgcgggggccccgcgggcgtttatcggggccgcgttgggcctgagccccctccaaaagctagccgtttactactatatcatccaccgagagaggcgcctgtcccccttccccgcgctagtccggctcgtaggccggtacacacagcgccacggcctgtacgtccctcggcccgacgacccagtcttggccgatgccatcaacgggctgtttcgcgacgcgctggcggccggaaccacagccgagcagctcctcatgttcgaccttctccccccaaaggacgtgccggtgggaagcgacgtgcaggccgacagcaccgctctgctgcgctttatagaatcgcaacgtctcgccgtccccgggggggtgatctcccccgagcacgtcgcgtaccttggtgcgttcctgagcgtgctgtacgctggccgcgggcgcatgtccgcagccacgcacaccgcgcggctgacaggggtgacctccctggtgctagcggtgggtgacgtggaccgtctttccgcgtttgaccgcggagcggcgggcgcggccagccgcacgcgggccgccgggtacctggatgtgcttcttaccgttcgtctcgctcgctcccaacacggacagtctgtgtaacagaccccaataaacgtatgtcgctaccacacccttgtgtgtcaatggacgcctctccgggggggaagggaaaacaaagaggggctgggggagcggcaccaccggggcctgaacaaacaaaccacagacacggttacagtttattcggtcgggcggagaaacggccgaagccacgccccctttattcgcgtctccaaaaaaacgggacacttgtccggagaacctttaggatgccagccagggcggcggtaatcataaccacgcccagcgcagaggcggccagaaacccgggcgcaattgcggccacgggctgcgtgtcaaaggctagcaaatgaatgacggttccgtttggaaatagcaacaaggccgtggacggcacgtcgctcgaaaacacgcttggggcgccctccgtcggcccggcggcgatttgctgctgtgtgttgtccgtatccaccagcaacacagacatgacctccccggccggggtgtagcgcataaacacggcccccacgagccccaggtcgcgctggttttgggtgcgcaccagccgcttggactcgatatcccgggtggagccttcgcatgtcgcggtgaggtaggttaggaacagtgggcgtcggacgtcgacgccggtgagcttgtagccgatcccccggggcagaggggagtgggtgacgacgtagctggcgttgtgggtgatgggtaccaggatccgtggctcgacgttggcagactgccccccgcaccgatgtgaggcctcagggacgaaggcgcggatcagggcgttgtagtgtgcccagcgcgtcagggtcgaggcgaggccgtgggtctgctgggccaggacttcgaccggggtctcggatcgggtggcttgagccagcgcgtccaggataaacacgctctcgtctagatcaaagcgcagggaggccgcgcatggcgaaaagtggtccggaagccaaaagagggttttctggtggtcggcccgggccagcgcggtccggaggtcggcgttggtcgctgcggcgacgtcggacgtacacagggccgaggctatcagaaggctccggcgggcgcgttcccgctgcaccgccgaggggacgcccgccaagaacggctgccggaggacagccgaggcgtaaaatagcgcccggtggacgaccggggtggtcagcacgcggccccctagaaactcggcatacagggcgtcgatgagatgggctgcgctgggcgccactgcgtcgtacgccgaggggctatccagcacgaaggccagctgatagcccagcgcgtgtaatgccaagctctgttcgcgctccagaatctcggccaccaggtgctggagccgagcctctagctgcaggcgggccgtgggatccaagactgacacattaaaaaacacagaatccgcggcacagcccgcggccccgcgggcggccaacccggcaagcgcgcgcgagtgggccaaaaagcctagcaggtcggagaggcagaccgcgccgtttgcgtgggcggcgttcacgaaagcaaaacccgacgtcgcgagcagccccgttaggcgccagaagagagggggacgcgggccctgctcggcgcccgcgtcccccgagaaaaactccgcgtatgcccgcgacaggaactgggcgtagttcgtgccctcctccgggtagccgcccacgcggcggagggcgtccagcgcggagccgttgtcggcccgcgtcagggaccctaggacaaagacccgataccgggggccgcccgggggcccgggaagagcccccggggggttttcgtccgcggggtccccgacccgatctagcgtctggcccgcggggaccaccatcacttccaccggagggctgtcgtgcatggatatcacgagccccatgaattcccgcccgtagcgcgcgcgcaccagcgcggcatcgcacccgagcaccagctcccccgtcgtccagatgcccacgggccacgtcgaggccgacggggagaaatacacgtacctacctggggatctcaacaggccccgggtggccaaccaggtcgtggacgcgttgtgcaggtgcgtgatgtccagctccgtcgtcgggtgccgccgggccccaaccggcggtcgggggggcggtgtatcacgcggcccgctcgggtggctcgccgtcgccacgttgtctccccgcgggaacgtcagggcctcggggtcagggacggccgaaaacgttacccaggcccgggaacgcagcaacacggaggcggttggattgtgcaagagacccttaaggggggcgaccgcggggggaggctgggcggtcggctcgaccgtgatgggggcgggcaggctcgcgttcgggggccggccgagcaggtaggtcttcgagatgtaaagcagctggccggggtcccgcggaaactcggccgtggtgaccaatacaaaacaaaagcgctcctcgtaccagcgaagaaggggcagagatgccgtagtcaggtttagttcgtccggcggcgccagaaatccgcgcggtggtttttgggggtcgggggtgtttggcagccacagacgcccggtgttcgtgtcgcgccagtacatgcggtccatgcccaggccatccaaaaaccatgggtctgtctgctcagtccagtcgtggacctgaccccacgcaacgcccaaaagaataacccccacgaaccataaaccattccccatgggggaccccgtccctaacccacggggcccgtggctatggcagggcttgccgccccgacgttggctgcgagccctgggccttcacccgaacttgggggttggggtggggaaaaggaagaaacgcgggcgtattggccccaatggggtctcggtggggtatcgacagagtgccagccctgggaccgaaccccgcgtttatgaacaaacgacccaacacccgtgcgttttattctgtctttttatttccgtcatagcgcgggttccttccggtattgtctccttccgtgtttcagttagcctcccccatctcccgggcaaacgtgcgcgccaggtcgcagatcgtcggtatggagcctggggtggtgacgtgggtctggaccatcccggaggtaagttgcagcagggcgtcccggcagccggcgggcgattggtcgtaatccaggataaagacgtgcatgggacggaggcgtttggccaagacgtccaaggcccaggcaaacacgttatacaggtcgccgttgggggccagcaactcgggggcccgaaacagggtaaataacgtgtccccgatatggggtcgtgggcccgcgttgctctggggctcggcaccctggggcggcacggccgtccccgaaagctgtccccaatcctcccgccacgacccgccgccctgcagataccgcaccgtattggcaagcagcccgtaaacgcggcgaatcgcggccaacatagccaggtcaagccgctcgccggggcgctggcgtttggccaggcggtcgatgtgtctgtcctccggaagggcccccaacacgatgtttgtgccgggcaaggtcggcgggatgagggccacgaacgccagcacggcctggggggtcatgctgcccataaggtatcgcgcggccgggtagcacaggagggcggcgatgggatggcggtcgaagatgagggtgagggccgggggcggggcatgtgagctcccagcctcccccccgatatgaggagccagaacggcgtcggtcacggcataaggcatgcccattgttatctgggcgcttgtcattaccaccgccgcgtccccggccgatatctcaccctggtcgaggcggtgttgtgtggtgtagatgttcgcgattgtctcggaagcccccagcacctgccagtaagtcatcggctcgggtacgtagacgatatcgtcgcgcgaacccagggccaccagcagttgcgtggtggtggttttccccatcccgtgaggaccgtctatataaacccgcagtagcgtgggcattttctgctccaggcggacttccgtggcttcttgctgccggcgagggcgcaacgccgtacgtcggttgctatggccgcgagaacgcgcagcctggtcgaacgcagacgcgtgttgatggcaggggtacgaagccatacgcgcttctacaaggcgcttgccaaagaggtgcgggagtttcacgccaccaagatctgcggcacgctgttgacgctgttaagcgggtcgctgcagggtcgctcggtgttcgaggccacacgcgtcaccttaatatgcgaagtggacctgggaccgcgccgccccgactgcatctgcgtgttcgaattcgccaatgacaagacgctgggcggggtttgtgtcatcatagaactaaagacatgcaaatatatttcttccggggacaccgccagcaaacgcgagcaacgggccacggggatgaagcagctgcgccactccctgaagctcctgcagtccctcgcgcctccgggtgacaagatagtgtacctgtgccccgtcctggtgtttgtcgcccaacggacgctccgcgtcagccgcgtgacccggctcgtcccgcagaaggtctccggtaatatcaccgcagtcgtgcggatgctccagagcctgtccacgtatacggtccccatggagcctaggacccagcgagcccgtcgccgccgcggcggcgctgcccgggggtctgcgagcagaccgaaaaggtcacactctggggcgcgcgacccgcccgagccagcggcccgccaggtaccacccgccgaccaaacccccgcctccacggagggcgggggggtgcttaagaggatcgcggcgctcttctgcgtgcccgtggccaccaagaccaaaccccgagctgcctccgaatgagagtgtttcgttccttccccctccccccgcgtcagacaaaccctaaccaccgcttaagcggcccccgcgaggtccgaagactcatttggatccggcgggagccacctgacaacagcccccgggtttccccacgccagacgccggtccgctgtgccatcgctccccttcatcccacccccatcttgtccccaaataaaacaaggtctggtagttaggacaacgaccgcagttctcgtgtgttattgtcgctctccgcctctcgcagatggacccgtattgcccatttgacgctctggacgtctgggaacacaggcgcttcatagtcgccgattcccgaaacttcatcacccccgagttcccccgggacttttggatgtcgcccgtctttaacctcccccgggagacggcggcggagcaggtggtcgtcctgcaggcccagcgcacagcggctgccgctgccctggagaacgccgccatgcaggcggccgagctccccgtcgatatcgagcgccggttacgcccgatcgaacggaacgtgcacgagatcgcaggcgccctggaggcgctggagacggcggcggccgccgccgaagaggcggatgccgcgcgcggggatgagccggcgggtgggggcgacgggggggcgcccccgggtctggccgtcgcggagatggaggtccagatcgtgcgcaacgacccgccgctacgatacgacaccaacctccccgtggatctgctacatatggtgtacgcgggccgcggggcgaccggctcgtcgggggtggtgttcgggacctggtaccgcactatccaggaccgcaccatcacggactttcccctgaccacccgcagtgccgactttcgggacggccggatgtccaagaccttcatgacggcgctggtcctgtccctgcagtcgtgcggccggctgtatgtgggccagcgccactattccgccttcgagtgcgccgtgttgtgtctctacctgctgtaccgaaacacgcacggggccgccgacgatagcgaccgcgctccggtcacgttcggggatctgctgggccggctgccccgctacctggcgtgcctggccgcggtgatcgggaccgagggcggccggccacagtaccgctaccgcgacgacaagctccccaagacgcagttcgcggccggcgggggccgctacgaacacggagcgctggcgtcgcacatcgtgatcgccacgctgatgcaccacggggtgctcccggcggccccgggggacgtcccccgggacgcgagcacccacgttaaccccgacggcgtggcgcaccacgacgacataaaccgcgccgccgccgcgttcctcagccggggccacaacctattcctgtgggaggaccagactctgctgcgggcaaccgcgaacaccataacggccctgggcgttatccagcggctcctcgcgaacggcaacgtgtacgcggaccgcctcaacaaccgcctgcagctgggcatgctgatccccggagccgtcccttcggaggccatcgcccgtggggcctccgggtccgactcgggggccatcaagagcggagacaacaatctggaggcgctatgtgccaattacgtgcttccgctgtaccgggccgacccggcggtcgagctgacccagctgtttcccggcctggccgccctgtgtcttgacgcccaggcggggcggccggtcgggtcgacgcggcgggtggtggatatgtcatcgggggcccgccaggcggcgctggtgcgcctcaccgccctggaactcatcaaccgcacccgcacaaaccccacccccgtgggggaggttatccacgcccacgacgccctggcgatccaatacgaacaggggcttggcctgctggcgcagcaggcacgcattggcttgggctccaacaccaagcgtttctccgcgttcaacgttagcagcgactacgacatgttgtactttttatgtctggggttcattccacagtacctgtcggcggtttagtgggtggtgggcgaggggggagggggcattagggagaaagaacaagagcctccgttgggttttctttgtgcctgtactcaaaaggtcataccccgtaaacggcgggctccagtcccggcccggcggttggcgtgaacgcaacggcgggagctgggttagcgtttagtttagcattcgctctcgcctttccgcccgcccccgaccgttgagcctttttttttttcgtccaccaaagtctctgtgggtgcgcgcatggcagccgatgccccgggagaccggatggaggagcccctgccagacagggccgtgcccatttacgtggctgggtttttggccctgtatgacagcggggactcgggcgagttggcattggatccggatacggtgcgggcggccctgcctccggataacccactcccgattaacgtggaccaccgcgctggctgcgaggtggggcgggtgctggccgtggtcgacgacccccgcgggccgttttttgtgggactgatcgcctgcgtgcaactggagcgcgtcctcgagacggccgccagcgctgcgattttcgagcgccgcgggccgccgctctcccgggaggagcgcctgttgtacctgatcaccaactacctgccctcggtctccctggccacaaaacgcctggggggcgaggcgcaccccgatcgcacgctgttcgcgcacgtagcgctgtgcgcgatcgggcggcgccttggcactatcgtcacctacgacaccggtctcgacgccgccatcgcgccctttcgccacctgtcgccggcgtctcgcgagggggcgcggcgactggccgccgaggccgagctcgcgctatccggacgcacctgggcgcccggcgtggaggcgctgacccacacgctgctttccaccgccgttaacaacatgatgctgcgggaccgctggagcctggtggccgagcggcggcggcaggccgggatcgccggacacacctacctccaggcgagcgaaaaattcaaaatgtggggggcggagcctgtttccgcgccggcgcgcgggtataagaacggggccccggagtccacggacataccgcccggctcgatcgctgccgcgccgcagggtgaccggtgcccaatcgtccgtcagcgcggggtcgcctcgcccccggtactgccccccatgaaccccgttccaacatcgggcaccccggcccccgcgccgcccggcgacgggagctacctgtggatcccggcctcccattacaaccagctcgtcgccggccacgccgcgccccaaccccagccgcattccgcgtttggtttcccggctgcggcgggggccgtggcctatgggcctcacggcgcgggtctttcccagcattaccctccccacgtcgcccatcagtatcccggggtgctgttctcgggacccagcccactcgaggcgcagatagccgcgttggtgggggccatagccgcggaccgccaggcgggcggtcagccggccgcgggagaccctggggtccgggggtcgggaaagcgtcgccggtacgaggcggggccgtcggagtcctactgcgaccaggacgaaccggacgcggactacccgtactaccccggggaggctcgaggcgggccgcgcggggtcgactctcggcgcgcggcccgccagtctcccgggaccaacgagaccatcacggcgctgatgggggcggtgacgtctctgcagcaggaactggcgcacatgcgggctcggaccagcgccccctatggaatgtacacgccggtggcgcactatcgccctcaggtgggggagccggaaccaacaacgacccacccggccctttgtcccccggaggccgtgtatcgccccccaccacacagcgccccctacggtcctccccagggtccggcgtcccatgcccccactcccccgtatgccccagctgcctgcccgccaggcccgccaccgcccccatgtccttccacccagacgcgcgcccctctaccgacggagcccgcgttcccccccgccgccaccggatcccaaccggaggcatccaacgcggaggccggggcccttgtcaacgccagcagcgcagcacacgtggacgttgacacggcccgcgccgccgatttgttcgtctctcagatgatgggggcccgctgattcgccccggtctttggtaccatgggatgtcttactgtatatctttttaaataaaccaggtaataccaaataagacccattggtgtatgttcttttttttttattgggaggggcgggtaggcgggtagctttacaatgcaaaagcctttgacgtggaggaaggcgtgggggggaggaaatcggcactgaccaagggggtccgttttgtcacgggaaaggaaagaggaaacaggccgcggacacccgggggagtttatgtgttcctttttctttcttcccacacacacacaaaaggcgtaccaaacaaaaaaaccaaaagatgcgcatgcggtttaacacccgtggtttttatttacaacaaaccccccgtcacaggtcgtcctcgtcggcgtcaccgtctttgttgggaacttgggtgtagttggtgttgcggcgcttgcgcatgaccatgtcggtgaccttggcgctgagcagcgcgctcgtgcccttcttcttggccttgtgttccgtgcgctccatggccgacaccagggccatgtaccgtatcatctccctggcctcggctagcttggcctcgtcaaagtcgccgccctcctcgccctccccggacgcgtccgggttggtggggttcttgagctccttggtggttagagggtacagggccttcatggggttgctctgcagccgcatgacgtaacgaaaggcgaagaaggccgccgccaggccggccaggaccaacagacccacggccagcgccccaaaggggttggacatgaaggaggacacgcccgacacggccgataccacgccgcccacgatgcccatcaccaccttgccgaccgcgcgccccaggtcgcccatcccctcgaagaacgcgcccaggcccgcgaacatggcggcgttggcgtcggcgtggatgaccgtgtcgatgtcggcgaagcgcaggtcgtgcagctggttgcggcgctggacctccgtgtagtccagcaggccgctgtccttgatctcgtggcgggtgtacacctccagggggacaaactcgtgatcctccagcatggtgatgttgaggtcgatgaaggtgctgacggtggtgatgtcggcgcggctcagctggtgggagtacgcgtactcctcgaagtacacgtagcccccaccgaaggtgaagtagcgccggtgtcccacggtgcacggctcgatcgcatcgcgcgtcagccgcagctcgttgttctcccccagctgcccctcgaccaacgggccctggtcttcgtaccgaaagctgaccagggggcggctgtagcaggccccgggccgcgagctgatgcgcatcgagttttggacgatcacgttgtccgcggcgaccggcacgcacgtggagacggccatcacgtcgccgagcatccgcgcgctcacccgccggcccacggtgaccgaggcgatggtgttggggttcagcttgcgggcctcgttccacagggtcagctcgtgattctgtagctcgcaccacgcgatggcaacgcggcccaacatatcgttgacatggcgctgtatgtggttgtacgtaaactgcagccgggcgaactcgatggaggaggtggtcttgatgcgctccacggacgcgttggcgctggccccgggcggcgggggcgtggggtttgggggcttgcggctctgctctcggaggtgttcccgcacgtacagctccgcgagcgtgttgctgagaaggggctggtacgcgatcagaaagcccccattggccaggtagtactgcggctggcccaccttgatgtgcgtcgcgttgtacctgcgggcgaagatgcggtccatggcgtcgcgggcgtccttgccgatgcagtcccccaggtccacgcgcgagagcgggtactcggtcaggttggtggtgaaggtggtggatatggcgtcggaggagaatcggaaggagccgccgtactcggagcgcagcatctcgtccacttcctgccacttggtcatggtgcagaccgacgggcgctttggcacccagtcccaggccacggtgaacttgggggtcgtgagcaggttccgggtggtcggcgccgtggcccgggccttggtggtgaggtcgcgcgcgtagaagccgtcgacctgcttgaagcggtcggcggcgtagctggtgtgttcggtgtgcgacccctcccggtagccgtaaaacggggacatgtacacaaagtcgccagtcgccagcacaaactcgttgtacgggtacaccgagcgcgcgtccacctcctcgacgatgcagtttaccgtcgtcccgtaccggtggaacgcctccacccgcgaggggttgtacttgaggtcggtggtgtgccagccccggctcgtgcgggtcgcggcgttggccggtttcagctccatgtcggtctcgtggtcgtcccggtgaaacgcggtggtctccaggttgttgcgcacgtacttggccgtggaccgacagacccccttggcgttgatcttgtcgatcacctcctcgaaggggacgggggcgcggtcctcaaagatccccataaactgggagtagcggtggccgaaccacacctgcgaaacggtgacgtctttgtagtacatggtggccttgaacttgtacggggcgatgttctccttgaagaccaccgcgatgccctccgtgtagttctgaccctcgggccgggtcgggcagcggcgcggctgctcgaactgcaccaccgtggcgcccgtggggggtgggcacacgtaaaagtttgcatcggtgttctccgccttgatgtcccgcaggtgctcgcgcagggtggcgtggcccgcggcgacggtcgcgttgtcgccggcggggcgtggtggcgttgggtttttcggttttttgttcttcttcggtttcgggtcccccgttggggcggcgccaagggcgggcggcgccggagtggcagggcccccgttcgccgcctgggtcgcggccgcgaccccaggcgtgccgggggaactcggagccgccgacgccaccaggacccccagcgtcaaccccaagagcgcccatacgacgaaccaccggcgcccccacgagggggcgccctggtgcatggcgggactacgggggcccgtcgtgccccccgtcaggtagcctgggggcgaggtgctggaggaccgagtagaggatcgagaaaacgtcgcggtcgtagaccacgaccgaccgggggccgatacagccgtcgggggcgctctcgacgatggccaccagcggacagtcggagtcgtacgtgagatatacgccgggcgggtaacggtaacgaccttcggaggtcgggcggctgcagtccgggcggcgcaactcgagctccccgcaccggtagaccgaggcaaagagtgtggtggcgataatcagctcgcgaatatatcgccaggcggcgcgctgagtgggcgttattccggaaatgccgtcaaaacagtaaaacctctgaaattcgctgacggcccaatcagcacccgagccccccgcccccatgatgaaccgggcgagctcctccttcaggtgcggcaggagccccacgttctcgacgctgtaatacagcgcggtgttggggggctgggcgaagctgtgggtggagtgatcaaagaggggcccgttgacgagctcgaagaagcgatgggtgatgctggggagcagggccgggtccacctggtgtcgcaggagagacgctcgcatgaaccggtgcgcgtcgaacacgcccggcgccgagcggttgtcgatgaccgtgcccgcgcccgccgtcagggcgcagaagcgcgcgcgcgccgcaaagccgttggcgaccgcggcgaacgtcgcgggcagcacctcgccgtggacgctgacccgcagcatcttctcgagctccccgcgctgctcgcggacgcagcgccccaggctggccaacgaccgcttcgtcaggcggtccgcgtacagccgccgtcgctcccgtacgtccgcggccgcttgcgtggcgatgtccccccacgtctcgggcccctgccccccgggcccgcggcgacggtcttcgtcctcgcccccgcccccgggagctcccaacccccgtgccccttcctctacggcgacacggtccccgtcgtcgtcggggcccgcgccgcccttgggcgcgtccgccgcgccccccgcccccatgcgcgccagcacgcgacgcagcgcctcctcgtcgcactgttcggggctgacgaggcgccgcaagagcggcgtcgtcaggtggtggtcgtagcacgcgcggatgagcgcctcgatctgatcgtcgggtgacgtggcctgaccgccgattattagggcgtccaccatatccagcgccgccaggtggctcccgaacgcgcgatcgaaatgctccgcccgccgcccgaacagcgccagttccacggccaccgcggcggtctcctgctgcaactcgcgccgcgccagcgcggtcaggttgctggcaaacgcgtccatggtggtctggccggcgcggtcgccggacgcgagccagaatcgcaattcgctgatggcgtacaggccgggcgtggtggcctgaaacacgtcgtgcgcctccagcagggcgtcggcctccttgcggaccgagtcgttctcgggcgacgggtggggctgcccgtcgccccccgcggtccgggccagcgcatggtccaacacggagagcgcccgcgcgcggtcggcgtccgacagcccggcggcgtggggcaggtaccgccgcagctcgttggcgtccagccgcacctgcgcctgctgggtgacgtggttacagatacggtccgccaggcggcgggcgatcgtcgccccctggttcgccgtcacacacagttcctcgaaacagaccgcgcaggggtgggacgggtcgctaagctccggggggacgataaggcccgaccccaccgcccccaccataaactcccgaacgcgctccagcgcggcggtggcgccgcgcgagggggtgatgaggtggcagtagtttagctgctttagaaagttctcgacgtcgtgcaggaaacacagctccatatggacggtcccgccatacgtatccagcctgacccgttggtgatacggacagggtcgggccaggcccatggtctcggtgaaaaacgccgcgacgtctcccgcggtcgcgaacgtctccaggctgcccaggagccgctcgccctcgcgccacgcgtactctagcagcaactccagggtgaccgacagcggggtgagaaaggccccggcctgggcctccaggcccggcctcagacgacgccgcagcgcccgcacctgaagcgcgttcagcttcagttgggggagcttcccccgtccgatgtgggggtcgcaccgccggagcagctctatctgaaacacataggtctgcacctgcccgagcagggctaacaacttttgacgggccacggtgggctcggacaccggggcggccatctcgcggcgccgatctgtaccgcggccggagtatgcggtggaccgaggcggtccgtacgctacccggtgtctggctgagccccggggtccccctcttcggggcggcctcccgcgggcccgccgaccggcaagccgggagtcggcggcgcgtgcgtttctgttctattcccagacaccgcggagaggaatcacggcccgcccagagatatagacacggaacacaaacaagcacggatgtcgtagcaataatttattttacacacattccccgccccgccctaggttcccccaccccccaacccctcacagcatatccaacgtcaggtctccctttttgtcggggggcccctccccaaacgggtcatccccgtggaacgcccgtttgcggccggcaaatgccggtcccggggcccccgggccgccgaacggcgtcgcgttgtcgtcctcgcagccaaaatccccaaagttaaacacctccccggcgttgccgagttggctgactagggcctcggcctcgtgcgccacctccagggccgcgtccgtcgaccactcgccgttgccgcgctccagggcacgcgcggtcagctccatcatctcctcgcttaggtactcgtcctccaggagcgccagccagtcctcgatctgcagctgctgggtgcggggccccaggcttttcacggtcgccacgaacacgctactggcgacggccgccccgccctcggagataatgccccggagctgctcgcacagcgagctttcgtgcgctccgccgccgaggttcgaggccgcgcacacaaacccggcccggggacaggccaggacgaacttgcgggtgcggtcaaaaataaggagcgggcacgcgtttttgccgcccatcaggctggcccagttcccggcctgaaacacacggtcgttgccggccatgccgtagtatttgctgatgctcaaccccaacacgaccatggggcgcgccgccatgacgggccgcagcaggttgcagctggcgaacatggacgtccacgcgcccggatgcgcgtccacggcgtccatcagcgcgcgggccccggcctccaggcccgccccgccctgcgcggaccacgcggccgccgcctgcacgctggggggacggcgggaccccgcgatgatggccgtgagggtgttgatgaagtatgtcgagtgatcgcagtaccgcagaatctggtttgccatgtagtacatcgccagctcgctcacgttgttgggggccaggttaataaagtttatcgcgccgtagtccagggaaaactttttaatgaacgcgatggtctcgatgtcctcgcgcgacaggagccgggcgggaagctggttgcgttggagggccgtccagaaccactgcgggttcggctggttggaccccgggggcttgccgttggggaagatggccgcgtggaactgcttcagcagaaagcccagcggtccgaggaggatgtccacgcgcttgtcgggcttctggtaggcgctctggaggctggcgacccgcgccttggcggcctcggacgcgttggcgctcgcgcccgcgaacaacacgcggctcttgacgcgcagctccttgggaaaccccagggtcacgcgggcaacgtcgccctcgaagctgctctcggcgggggccgtctggccggccgttaggctgggggcgcagatagccgccccctccgagagcgcgaccgtcagcgttttggccgacagaaacccgttgttaaacatgtccatcacgcgccgccgcagcaccggttggaattgattgcgaaagttgcgcccctcgaccgactgcccggcgaacaccccgtggcactggctcagggccaggtcctgatacacggcgaggttggatcgccgcccgagaagctgaagcagggggcatggcccgcacgcgtacgggtccagcgtcagggacatggcgtggttggcctcgcccagaccgtcgcgaaacttgaagttcctcccctccaccaggttgcgcatcagctgctccacctcgcggtccacgacctgcctgacgttgttcaccaccgtatgcagggcctcgcggttggtgatgatggtctccagccgccccatggccgtggggaccgcctggtccacgtactgcagggtctcgagttcggccatgacgcgctcggtcgccgcgcggtacgtctcctgcatgatggtccgggcggtctcggatccgtccgcgcgcttcagggccgagaaggcggcgtagtttcccagcacgtcgcagtcgctgtacatgctgttcatggtcccgaagacgccgatggctccgcgggcggcgctggcgaacttgggatggcgcgcccggaggcgcatgagcgtcgtgtgtacgcaggcgtggcgcgtgtcgaaggtgcacaggttgcagggcacgtcggtctggttggagtccgcgacgtatcgaaacacgtccatctcctggcgcccgacgatcacgccgccgtcgcagcgctccaggtaaaacagcatcttggccagcagcgccggggaaaacccacacagcatggccaggtgctcgccggcaaattcctgggttccgccgacgaggggcgcggtgggccgaccctcgaacccgggcaccacgtgtccctcgcggtccacctgtgggttggccgccacgtgggtcccgggcacgaggaagaagcggtaaaaggagggtttgctgtggtcctttgggtccgccggaccggcgtcgtccacctcggtgagatggagggccgagttggtgctaaataccatggcccccacgagtcccgcggcgcgcgccaggtacgccccgacggcgttggcgcgggccgcggccgtgtcctggccctcgcacagcggccacgcggagatgtcggtgggcggctcgtcgaagacggccatcgacacgatagactcgagggccagggcggcgtctccggccatgacggaggccaggcgctgttcgaacccgcccgccgggcccttgccgccgccgtcgcgcccaccccgcggggtcttaccctggctggcttcgaaggccgtgaacgtaatgtcggcggggagggcggcgccctcgtggttttcgtcaaacgccaggtgggcggccgcgcgggccacggcgtccacgtttcggcatcgcagtgccacggcggcgggtcccacgaccgcctcgaacaggaggcggttgagggggcggttaaaaaacggaagcgggtaggtaaaattctccccgatcgatcggtggttggcgttgaacggctcggcgatgacccggctaaaatccggcatgaacagctgcaacggatacacgggtatgcggtgcacctccgccccgcctatggttaccttgtccgagcctcccaggtgcagaaaggtgttgttgatgcacacggcctccttgaagccctcggtaacgaccagatacaggagggcgcggtccgggtccaggccgaggcgctcacacagcgcctcccccgtcgtctcgtgtttgaggtcgccgggccggggggtgtagtccgaaaagccaaaatggcggcgtgcccgctcgcagagtcgcgtcaggtttggggcctgggtgctggggtccaggtgccggccgccgtgaaagacgtacacggacgagctgtagtgcgatggcgtcagtttcagggacaccgcggtacccccgagccccgtcgtgcgagaacccacgaccacggctacgttggcctcaaagccgctctccacggtcaggcccacgaccaggggcgccacggcgacgtcggcatcgccgctgcgcgccgacagtaacgccagaagctcgatgccttcggacggacacgcgcgagcgtacacgtatcccaggggcccgggggggaccttgatggtggttgccgtcttgggctttgtctccatgtcctcctggcaatcggtccgcaaacggaggtaatcccggcacgacgacggacgcccgacgaggtatgtctcccgagcgtcaaaatccgggggggggggcggcgacggtcaaggggagggtgggagaccggggttggggaatgaatccctacccttcacagacaacccccgggtaaccacggggtgccgatgaaccccggcggctggcaacgcggggtccctgcgagaggcacagatgcttacggtcaggtgctccgggccgggtgcgtctgatatgcggttggtatatgtacactttacctgggggcgtgccggaccgccccagcccctcccacaccccgcgcgtcatcagccggatttaaatccggctacgtcacgctcctgtcggccgccggcggtccataagcccggccggccgggccgacgcgaataaaccgggccgccggccggggcgccgcgcagcagctcgccgcccggatccgccagacaaacaaggcccttgcacatgccggcccgggcgagcctgggggtccggtaattttgccatcccacccaagcggcttttggggtttttcctcttcccccctccccacatcccccctctttaggggttcgggtgggaacaaccgcgatgttttccggtggcggcggcccgctgtcccccggaggaaagtcggcggccagggcggcgtccgggttttttgcgcccgccggccctcgcggagccggccggggacccccgccttgtttgaggcaaaacttttacaacccctacctcgccccagtcgggacgcaacagaagccgaccgggccaacccagcgccatacgtactatagcgaatgcgatgaatttcgattcatcgccccgcgggtgctggacgaggatgcccccccggagaagcgcgccggggtgcacgacggtcacctcaagcgcgcccccaaggtgtactgcgggggggacgagcgcgacgtcctccgcgtcgggtcgggcggcttctggccgcggcgctcgcgcctgtggggcggcgtggaccacgccccggcggggttcaaccccaccgtcaccgtctttcacgtgtacgacatcctggagaacgtggagcacgcgtacggcatgcgcgcggcccagttccacgcgcggtttatggacgccatcacaccgacggggaccgtcatcacgctcctgggcctgactccggaaggccaccgggtggccgttcacgtttacggcacgcggcagtacttttacatgaacaaggaggaggttgacaggcacctacaatgccgcgccccacgagatctctgcgagcgcatggccgcggccctgcgcgagtccccgggcgcgtcgttccgcggcatctccgcggaccacttcgaggcggaggtggtggagcgcaccgacgtgtactactacgagacgcgccccgctctgttttaccgcgtctacgtccgaagcgggcgcgtgctgtcgtacctgtgcgacaacttctgcccggccatcaagaagtacgagggtggggtcgacgccaccacccggttcatcctggacaaccccgggttcgtcaccttcggctggtaccgtctcaaaccgggccggaacaacacgctagcccagccgcgggccccgatggccttcgggacatccagcgacgtcgagtttaactgtacggcggacaacctggccatcgaggggggcatgagcgacctaccggcatacaagctcatgtgcttcgatatcgaatgcaaggcggggggggaggacgagctggcctttccggtggccgggcacccggaggacctggttattcagatatcctgtctgctctacgacctgtccaccaccgccctggagcacgtcctcctgttttcgctcggttcctgcgacctccccgaatcccacctgaacgagctggcggccaggggcctgcccacgcccgtggttctggaattcgacagcgaattcgagatgctgttggccttcatgacccttgtgaaacagtacggccccgagttcgtgaccgggtacaacatcatcaacttcgactggcccttcttgctggccaagctgacggacatttacaaggtccccctggacgggtacggccgcatgaacggccggggcgtgtttcgcgtgtgggacataggccagagccacttccagaagcgcagcaagataaaggtgaacggcatggtgaacatcgacatgtacgggatcataaccgacaagatcaagctctcgagctacaagctcaacgccgtggccgaagccgtcctgaaggacaagaagaaggacctgagctatcgcgacatccccgcctactacgccaccgggcccgcgcaacgcggggtgatcggcgagtactgcatacaggattccctgctggtgggccagctgttttttaagtttttgccccatctggagctctcggccgtcgcgcgcttggcgggtattaacatcacccgcaccatctacgacggccagcagatccgcgtctttacgtgcctgctgcgcctggccgaccagaagggctttattctgccggacacccaggggcgatttaggggcgccgggggggaggcgcccaagcgtccggccgcagcccgggaggacgaggagcggccagaggaggagggggaggacgaggacgaacgcgaggagggcgggggcgagcgggagccggagggcgcgcgggagaccgccggccggcacgtggggtaccagggggccagggtccttgaccccacttccgggtttcacgtgaaccccgtggtggtgttcgactttgccagcctgtaccccagcatcatccaggcccacaacctgtgcttcagcacgctctccctgagggccgacgcagtggcgcacctggaggcgggcaaggactacctggagatcgaggtgggggggcgacggctgttcttcgtcaaggctcacgtgcgagagagcctcctcagcatcctcctgcgggactggctcgccatgcgaaagcagatccgctcgcggattccccagagcagccccgaggaggccgtgctcctggacaagcagcaggccgccatcaaggtcgtgtgtaactcggtgtacgggttcacgggagtgcagcacggactcctgccgtgcctgcacgttgccgcgacggtgacgaccatcggccgcgagatgctgctcgcgacccgcgagtacgtccacgcgcgctgggcggccttcgaacagctcctggccgatttcccggaggcggccgacatgcgcgcccccgggccctattccatgcgcatcatctacggggacacggactccatatttgtgctgtgccgcggcctcacggccgccgggctgacggccatgggcgacaagatggcgagccacatctcgcgcgcgctgtttctgccccccatcaaactcgagtgcgaaaagacgttcaccaagctgctgctgatcgccaagaaaaagtacatcggcgtcatctacgggggtaagatgctcatcaagggcgtggatctggtgcgcaaaaacaactgcgcgtttatcaaccgcacctccagggccctggtcgacctgctgttttacgacgataccgtatccggagcggccgccgcgttagccgagcgccccgcagaggagtggctggcgcgacccctgcccgagggactgcaggcgttcggggccgtcctcgtagacgcccatcggcgcatcaccgacccggagagggacatccaggactttgtcctcaccgccgaactgagcagacacccgcgcgcgtacaccaacaagcgcctggcccacctgacggtgtattacaagctcatggcccgccgcgcgcaggtcccgtccatcaaggaccggatcccgtacgtgatcgtggcccagacccgcgaggtagaggagacggtcgcgcggctggccgccctccgcgagctagacgccgccgccccaggggacgagcccgccccccccgcggccctgccctccccggccaagcgcccccgggagacgccgtcgcatgccgaccccccgggaggcgcgtccaagccccgcaagctgctggtgtccgagctggccgaggatcccgcatacgccattgcccacggcgtcgccctgaacacggactattacttctcccacctgttgggggcggcgtgcgtgacattcaaggccctgtttgggaataacgccaagatcaccgagagtctgttaaaaaggtttattcccgaagtgtggcaccccccggacgacgtggccgcgcggctccgggccgcagggttcggggcggtgggtgccggcgctacggcggaggaaactcgtcgaatgttgcatagagcctttgatactctagcatgagccccccgtcgaagctgatgtccctcattttacaataaatgtctgcggccgacacggtcggaatctccgcgtccgtgggtttctctgcgttgcgccggaccacgagcacaaacgtgctctgccacacgtgggcgacgaaccggtaccccgggcacgcggtgagcatccggtctatgagccggtagtgcaggtgggcggacgtgccgggaaagatgacgtacagcatgtggcccccgtaagtggggtccgggtaaaacaacagccgcgggtcgcacgccccgcctccgcgcaggatcgtgtggacgaaaaaaagctcgggttggccaagaatcccggccaagaggtcctggaggggggcgttgtggcggtcggccaacacgaccaaggaggccaggaaggcgcgatgctcgaatatcgtgttgatctgctgcacgaaggccaggattagggcctcgcggctggtggcggcgaaccgcccgtctcccgcgttgcacgcgggacagcaacccccgatgcctaggtagtagcccatcccggagagggtcaggcagttgtcggccacggtctggtccagacagaagggcagcgacacgggagtggtcttcaccaggggcaccgagaacgagcgcacgatggcgatctcctcggagggcgtctgggcgagggcggcgaaaaggccccgatagcgctggcgctcgtgtaaacacagctcctgtttgcgggcgtgaggcggcaggctcttccgggaggcccgacgcaccacgcccagagtcccgccggccgcagaggagcacgaccgccggcgctccttgccgtgatagggcccgggccgggagccgcggcgatgggggtcggtatcatacataggtacacagggtgtgctccagggacaggagcgagatcgagtggcgtctaagcagcgcgcccgcctcacggacaaatgtggcgagcgcggtgggctttggtacaaatacctgatacgtcttgaaggtgtagatgagggcacgcaacgctatgcagacacgcccctcgaactcgttcccgcaggccagcttggccttgtggagcagcagctcgtcgggatgggtggcggggggatggccgaacagaacccaggggtcaacctccatctccgtgatggcgcacatggggtcacagaacatgtgcttaaagatggcctcgggccccgcggcccgcagcaggctcacaaaccggcccccgtccccgggctgcgtctcggggtccgcctcgagctggtcgacgacgggtacgatacagtcgaagaggctcgtgttgttttccgagtagcggaccacggaggcccggagtctgcgcagggccagccagtaagcccgcaccagtaacaggttacacagcaggcattctccgccggtgcgcccgcgcccccggccgtgtttcagcacggtggccatcagagggcccaggtcgaggtcgggctgggcatcgggttcggtaaactgcgcaaagcgcggagccacgtcgcgcgtgcgtgccccgcgatgcgcttcccaggactggcggaccgtggcgcgacgggcctccgcggcagcgcgcagctggggccccgactcccagacggcgggggtgccggcgaggagcagcaggaccagatccgcgtacgcccacgtatccggcgactcctccggctcgcggtccccggcgaccgtctcgaattccccgttgcgagcggcggcgcgcgtacagcagctgtccccgcccccgcgccgaccctccgtgcagtccaggagacgggcgcaatccttccagttcatcagcgcggtggtgagcgacggctgcgtgccggatcccgccgccgaccccgccccctcctcgcccccggaggccaaggttccgatgagggcccgggtggcagactgcgccaggaacgagtagttggagtactgcaccttggcggctcccggggagggcgagggcttgggttgcttctgggcatgccgcccgggcaccccgccgtcggtacggaagcagcagtggagaaaaaagtgccggtggatgtcgtttatggtgagggcaaagcgtgcgaaggagccgaccagggtcgccttcttggtgcgcagaaagtggcggtccatgacgtacacaaactcgaacgcggccacgaagatgctagcggcgcagtggggcgcccccaggcatttggcacagagaaacgcgtaatcggccacccactggggcgagaggcggtaggtttgcttgtacagctcgatggtgcggcagaccagacagggccggtccagcgcgaaggtgtcgatggccgccgcggaaaagggcccggtgtccaaaagcccctccccacagggatccgggggcgggttgcggggtcctccgcgcccgcccgaaccccctccgtcgcccgcccccccgcgggcccttgagggggcggtgaccacgtcggcggcgacgtcctcgtcgagcgtaccgacgggcggcacacctatcacgtgactggccgccaggagctcggcgcagagagcctcgttaagagccaggaggctgggatcgaaggccacatacgcgcgctcgaacgcccccgccttccagctgctgccgggggactcttcgcacaccgcgacgctcgccaggaccccggggggcgaagttgccatggctgggcgggaggggcgcacgcgccagcgaactttacgggacacaatccccgactgcgcgctgcggtcccagaccctggagagtctagacgcgcgctacgtctcgcgagacggcgcgcatgacgcggccgtctggttcgaggatatgacccccgccgagctggaggttgtcttcccgactacggacgccaagctgaactacctgtcgcggacgcagcggctggcctccctcctgacgtacgccgggcctataaaagcgcccgacgacgccgccgccccgcagaccccggacaccgcgtgtgtgcacggcgagctgctcgcccgcaagcgggaaagattcgcggcggtcattaaccggttcctggacctgcaccagattctgcggggctgacgcgcgcgctgttgggcgggacggttcgcgaaccctttggtgggtttacgcgggcacgcacgctcccatcgcgggcgccatggcgggactgggcaagccctaccccggccacccaggtgacgccttcgagggtctcgttcagcgaattcggcttatcgtcccatctacgttgcggggcggggacggggaggcgggcccctactctccctccagcctcccctccaggtgcgcctttcagtttcatggccatgacgggtccgacgagtcgtttcccatcgagtatgtactgcggcttatgaacgactgggccgaggtcccgtgcaacccttacctgcgcatacagaacaccggcgtgtcggtgctgtttcaggggttttttcatcgcccacacaacgcccccgggggcgcgattacgccagagcggaccaatgtgatcctgggctccaccgagacgacggggctgtccctcggcgacctggacaccatcaaggggcggctcggcctggatgcccggccgatgatggccagcatgtggatcagctgctttgtgcgcatgccccgcgtgcagctcgcgtttcggttcatgggccccgaagatgccggacggacgagacggatcctgtgccgcgccgccgagcaggctattacccgtcgccgccgaacccggcggtcccgggaggcgtacggggccgaggccgggctgggggtggctggaacgggtttccgggccaggggggacggttttggcccgctccccttgttaacccaagggccctcccgcccgtggcaccaggccctgcggggtcttaagcacctacggattggcccccccgcgctcgttttggcggcgggactcgtcctgggggccgctatttggtgggtggttggtgctggcgcgcgcctataaaaaaggacgcaccgccgccctaatcgccagtgcgttccggacgccttcgccccacacagccctcccgtccgacacccccatatcgcttcccgacctccggtcccgatggccgtcccgcaatttcaccgccccagcaccgttaccaccgatagcgtccgggcgcttggcatgcgcgggctcgtcttggccaccaataactctcagtttatcatggataacaaccacccgcacccccagggcacccaaggggccgtgcgggagtttctccgcggtcaggcggcggcgctgacggaccttggtctggcccacgcaaacaacacgtttaccccgcagcctatgttcgcgggcgacgccccggccgcctggttgcggcccgcgtttggcctgcggcgcacctattcaccgtttgtcgttcgagaaccttcgacgcccgggaccccgtgaggcccggggagttccttctggggtgttttaatcaataaaagaccacaccaacgcacgagccttgcgtttaatgtcgtgtttattcaagggagtgggatagggttcgacggttcgaaacttaacacacaaaataatcgagcgcgtctagcccagtaacatgcgcacgtgatgtaggctggtcagcacggcgtcgctgtgatgaagcagcgcccggcgggtccgctgtaactgctgttgtaggcggtaacaggcgcggatcagcaccgccagggcgctacgaccggtgcgttgcacgtagcgtcgcgacagaactgcgtttgccgatacgggcggggggccgaattgtaagcgcgtcacctcttgggagtcatcggcggataacgcactgaatggttcgttggttatgggggagtgtggttcccgagggagtgggtcgagcgcctcggcctcggaatccgagaggaacaacgaggtggtgtcggagtcttcgtcgtcagagacatacagggtctgaagcagcgacacgggcgggggggtagcgtcaatgtgtagcgcgagggaggatgcccacgaagacaccccagacaaggagctgcccgtgcgtggatttgtggacgacgcggaagccgggacggatgggcggttttgcggtgcccggaaccgaaccgccggatactccccgggtgctacatgcccgttttggggctggggttggggctggggctggggctggggttggggctggggctggggttggggctggggttggggctggggctggggttggggctggggttggggctggggttggggctggggctggggttggggttggggctggggttggggttggggctggggctggggctggggttggggctggggttggggttggggctggggttggggttggggctggggttggggctggggttggggttggggctggggttggggctggggctggggctggggctggggttggggctggggttggggctggggttggggctggggttggggctggggttggggctggggctggggttggggttggggttggggttggggctggggttggggttggggctggggttggggttggggctggggttggggctggggttggggctggggttggggctggggttggggctggggttggggctggggttggggctggggttggggctggggttggggctggggttggggctggggttggggctggggttggggctggggcgcggacaggcggttgacggtcaaatgcccccgggggcgcgcagatgtggtgggcgtggccaccggctgccgtgtagtggggcggcgggaaaccgggcctccgggcgtaacaccgccctccagcgtcaagtatgtggggggcgggcctgacgtcgggggcggggtgacgggttggaccgcgggaggcgggggagagggacctgcgggagaggatgaggtcggctcggccgggttgcggcctaaaacaggggccgtggggtcggcggggtcccagggtgaagggagggattcccgcgattcggacagcgacgcgacagcggggcgcgtaaggcgccgctgcggcccgcctacgggaaccctggggggggttggcgcgggacccgaggttagcggggggcggcggttttcgcccccgggcaaaaccgtgccggttgcgaccgggggcggaacgggatcgatagggagagcgggagaagcctggccggcgaactggggaccgagcgggaggggcacaccagacaccaaagcgtggagcgctggctctgggggtttgggaggggccggggggcgcgcgaaatcggtaaccggggcgaccgtgtcggggagggcaggcggccgccaaccctgggtggtcgcggaagcctgggtggcgcgcgccagggagcgtgcccggcggtgtcggcgcgcgcgcgacccggacgaagaagcggcagaagcgcgggaggaggcgggggggcggggggcggtggcatcggggggcgccggggaactttggggggacggcaagcgccggaagtcgtcgcgggggcccacgggcgccggccgcgtgctttcggccgggacgcccggtcgtgcttcgcgagccgtgactgccggcccagggggccgcggtgcacactgggacgtggggacggactgatcggcggtgggcgaaagggggtccggggcaaggaggggcgcggggccgccggagtcgtcagacgcgagctcctccaggccgtgaatccatgcccacatgcgaggggggacgggctcgccgggggtggcgtcggtgaatagcgtgggggccaggcttccgggccccaacgagccctccgtcccaacaaggtccgccgggccgggggtcgggttcgggaccgaggggctctggtcgtcgggggcgcgctggtacaccggatgccccgggaatagctcccccgacaggagggaggcgtcgaacggccgcccgaggatagctcgcgcgaggaaggggtcctcgtcggtggcgctggcggcgaggacgtcctcgccgcccgccacaaacgggagctcctcggtggcctcgctgccaacaaaccgcacgtcgggggggccgggggggtccgggttttcccacaacaccgcgaccggggtcatggagatgtccacgagcaccagacacggcgggccccgggcgaggggccgctcggcgatgagcgcggacaggcgcgggagctgtgccgccagacacgcgttttcaatcgggttcaggtcggcgtgcaggaggcggacggcccacgtctcgatgtcggacgacacggcatcgcgcaaggcggcgtccggcccgcgagcgcgtgagtcaaacagcgtgagacacagctccagctccgactcgcgggaaaaggccgtggtgttgcggagcgccacgacgacgggcgcgcccaggagcactgccgccagcaccaggtccatggccgtaacgcgcgccgcgggggtgcggtgggtggcggcggccggcacggcgacgtgctggcccgtgggccggtagagggcgttggggggagcggggggtgacgcctcgcgcccccccgaggggctcagcgtctgcccagattccagacgcgcggtcagaagggcgtcgaaactgtcatactctgtgtagtcgtccggaaacatgcaggtccaaagagcggccagagcggtgcttgggagacacatgcgcccgaggacgctcaccgccgccagcgcctgggcgggactcagctttcccagcgcggcgccgcgctcggttcccagctcggggaccgagcgccagggcgccagggggtcggtttcggacaacttgccgcggcgccagtctgccagccgcgtgccgaacatgaggccccgggtcggagggcctccggtcgaaaacactggcagcacgcggatgcgggcgtctggatgcggggtcaggcgctgcacgaatagcatggaatctgctgcgttctgaaacgcacgggggagggtgagatgcatgtactcgtgttggcggaccagatccaggcgccaaaaggtgtaaatgtgttccggggagctggccaccagcgccaccagcacgtcgttctcgttaaaggaaacgcggtgcctagtggagctgtggggcccgagcggcggtcccggggccgccgcgtcacccccccattccagctgggcccagcgacacccaaactcgcgcgtgagagtggtcgcgacgagggcgacgtagagctcggccgccgcatccatcgaggccccccatctcgcctggcggtggcgcacaaagcgtccgaagagctgaaagttggcggcctgggcgtcgctgagggccagctgaagccggttgatgacggtgatgacgtacatggccgtgacggtcgaggccgactccagggtgtccgtcggaagcggggggcgaatgcatgccgcctcgggacacatcagcagcgcgccgagcttgtcggtcacggccgggaagcagagcgcgtactgcagtggcgttccatccgggaccaaaaagctgggggcgaacggccgatccagcgtactggtggcctcgcgcagcaccaggggccccgggcctccgctcactcgcaggtacgcctcgccccggcggcgcagcatctgcgggtcggcctcttggccgggtggggcggacgcccgggcgcgggcgtctagggcgcgaagatccacgagcaggggcgcgggggcggcggccccccccgcgcccgtctggcctgtggccttggcgtacgcgctatataagcccatgcggcgttggatgagctcccgcgcgccccggaactcctccaccgcccatggggccaggtccccggccaccgcgtcgaattccgccaacaggccccccagggtgtcaaagttcatctcccaggccacccttggcaccacctcgtcccgcagccgggcgctcaggtcggcgtgttgggccacgcgccccccgagctcctccacggccccggcccgctcggcgctcttggcgcccaggacgccctggtacttggcgggaaggcgctcgtagtcccgctgggctcgcagccccgacacagtgttggtggtgtcctgcagggcgcgaagctgctcgcatgccgcgcgaaatccctcgggcgatttccaggcccccccgcgaacgcggccgaagcgaccccatacctcgtcccactccgcctcggcctcctcgagagacctccgcagggcctcgacgcggcgacgggtgtcgaagagcgcctgcaggcgcgcgccctgtcgcgtcaggaggcccgggccgtcgccgctggccgcgtttagcgggtgcgtctcaaaggtacgctgggcatgttccaaccaggcgaccgcctgcacgtcgagctcgcgcgccttctccgtctggtccaacagaatttcgacctgatccgcgatctcctccgccgagcgcgcctggtccagcgtcttggccacggtcgccgggacggcgaccaccttcagcagggtcttcagattggccagaccctcggcctcgagctgggcccggcgctcgcgcgcggccagcacctcccgcagccccgccgtgacccgctcggtggcttcggcgcgctgctgtttggcgcgcaccacggcgtccttggtatcggccaggtcctgtcgggtcacgaatgcgacgtagtcggcgtacgccgtgtccttcacggggctctggtccacgcgctccagcgccgccacgcacgccaccagcgcgtcctcgctcgggcagggcagggtgacccctgcccggacaagctcggcggccgccgccgggtcgttgcgcaccgcggatatctcctccgcggcggcggccaggtccagcgccacgcttccgatcgcgcgccgcgcgtcggcccggagggcgtccaggcgatcgcggatatccacgtactcggcgtagcccttttgaaaaaacggcacgtactggcgcagggccggcacgccccccaagtcttccgacaggtgtaggacggcctcgtggtagtcgataaacccgtcgttcgcctgggcccgctccagcagcccccccgccagccgcagaagccgcgccaggggctcggtgtccacccgaaacatgtcggcgtacgtgtcggccgcggccccgaaggccgcgctccagtcgatgcggtgaatggctgcgagcggggggagcatggggtggcgctggttctcgggggtgtatgggttaaacgcaagggccgtctccagggcaagggtcaccgccttggcgttggttcccagcgcctgttcggcccgctttcggaagtcccgggggttgtagccgtgcgtgcccgccagcgcctgcaggcgacggagctcgaccacgtcaaactcggcaccgctttccacgcggtccagcacggcctccacgtcggcggcccagcgctcgtggctactgcgggcgcgctgggccgccatcttctctctcaggtcggcgatggcggcctcaagttcgtcggcgcggcgtcgcgtggcgccgatgacctttcccagctcctgcagggcgcgcccgctgggggagtggtccccggccgtcccttcggcgtgcaacaggcccccgaacctgccctcgtggcccgcgaggctttcccgcgcgccggtggtcgcgcgcgtcgcggcctggatcagggaggcatgctctccctccggttggttggcggcccggcgcacctggacgacaaggtcggctgccgccgaccctaaggtcgtgagctgggcgatggccccccgcgcgtccagggccaaccgagtcgccttgacgtatcccgcggcgctgtcggccatggccgctaggaaggccaggggggaggccgggtcgctggcggccgcgcccagggccgtcaccgcgtcgaccaggacgcggtgcgcccgcacggccgcatccaccgtcgacgcggggtctgccgtcgcgacggcggcgctgccggcgttgatggcgttcgagacggcgtgggctatgatcggggcgtgatcggcgaagaactgcaagagaaacggagtctctggggcgtcggcgaacaggttcttcagcaccaccacgaagctgggatgcaagccagacagagccgtcgccgtgtccggagtcgggtgctccagggcatctcggtactgccccagcagcccccacatgtccgcccgcagcgccgccgtaacctcagggggcgccccccgaacggcctcggggaggtccgaccagcccgccggcagggaggcccgcagggtcgccaggacggccggacaggcctttagccccacaaagtcagggagggggcgcaggaccccctggagtttgtgcaagaacttctcccgggcgtcgcgggccaccttcgcccgctcccgcgctccctcgagcattgcctccagggagcgcgcgcgctcccgcaaacgggcacgcgcatcgggggcgagctctgccgtcagcttggcggcatccatggcccgcgcctgccgcagcgcttcctcggccatgcgcgtggcctctggcgacagcccgccgtcgtcggggtagggcgacgcgccgggcgcaggaacaaaggccgcgtcgctgtccagctgctggcccagggccgcatctagggcgtcgaagcgccgcagctcggccagacccgagctgcggcgcgcctgctggtcgttaatgtcgcggatgctgcgcgccagctcgtccagcggcttgcgttctatcagcccttggttggcggcgtccgtcaggacggagagccaggccgccaggtcctcgggggcgtccagcgtctggccccgctggatcagatcccgcaataggatggccgtggggctggtcgcgatcgggggcggggcgggaatggcggcgcgctgcgcgatgtcccgcgtgtgctggtcgaagacaggcagggactcgagcagctggaccacgggcacgacggcggccgaagccacgtgaaaccggcggtcgttgttgtcgctggcctgtagagccttggcgctgtatacggccccccggtaaaagtactccttaaccgcgccctcgatcgcccgacgggcctgggtccgcacctcctccagccgaacctgaacggcctcggggcccagggggggtgggcgcggagccccctgcggggccgccccggccggggcgggcattacgccgaggggcccggcgtgctgtgagaccgcgtcgaccccgcgagcgagggcgtcgagggcctcgcgcatctggcgatcctccgcctccaccctaatctcttcgccacgggcaaatttggccagagcctggactctatacagaagcggttctgggtgcgtcggggtggcgggggcaaaaagggtgtccgggtgggcctgcgagcgctccagaagccactcgccgaggcgtgtatacagattggccggcggggccgcgcgaagctgcagctccaggtccgcgagttccccgtaaaaggcgtccgtctcccgaatgacatccctagccacaaggatcagcttcgccagcgccaggcgaccgatcagagagttttcgtccagcacgtgctggacgaggggcagatgggcggccacgtcggccaggctcaggcgcgtggaggccagaaagtcccccacggccgttttccggggcagcatgctcagggtaaactccagcagggcggcggccgggccggccaccccggcctgggtgtgcgtccgggccccgttctcgatgagaaaggcgaggacgcgttcaaagaaaaaaataacacagagctccagcagccccggagaagccggatacggcgaccgtaaggcgctgatggtgagccgcgaacacgcggcgacctcgcgggccagggtggcggagcacgcggtgaacttaaccgccgtggcggccacgtttgggtgggcctcgaacagctgggcgaggtctgcgcccgggggctcgggtgagcggcgagtcttcagcgcctcgagggcctgtgaggacgccggaaccatgggcccgtcgtcctcgcccgcctcggcgaccggcggcccggccgggtcggggggtgccgaggcgaggacaggctccggaacggaggcggggaccgcggccccgacgggggttttgcctttgggggtggatttcttcttggttttggcagggggggccgagcgtttcgttttctcccccgaagtcaggtcttcgacgctggaaggcggagtccaggtgggtcggcggcgcttgggaaggccggccgagtagcgtgcccggtgccgaccaaccgggacgacgcccatctccaggacccgcatgtcgtcgtcatcttcttcggccgcctctgcggcgggggtcttgggggcggagggaggcggtggtgggatcgcggagggtgggtcggcggaggggggatccgtgggtggggtaccctttagggccaccgcccatacatcgtcgggcgcccgattcgggcgcttggcctctggttttgccgacggaccggccgtcccccgggatgtctcggaggccctgtcgtcgcgacgggcccgggtcggtggcggcgactgggcggctgtgggcgggtgtggccccggcccccctcccccctcccgggggcccacgccgacgcagggctcccccaggcccgcgatctcgccccgcagggggtgcgtgatggccacgcgccgttcgctgaacgcttcgtcctgcatgtaagtctcgctggccccgtaaagatgcagagccgcggccgtcaagtccgcaggagccgcgggttccgggcccgacggcacgaaaaacaccatggctcccgcccaccgtacgtccgggcgatcgcgggtgtaatacgtcaggtatggatacatgtcccccgcccgcactttggcgatgaacgcgggggtgccctccggaaggccatgcgggtcaaaaaggtatgcggtgtcgccgtccctgaacagccccatccctagggggccaatggttaggagcgtgtacgacagggggcgcagggcccacgggccggcgaagaacgtgtgtgcggggcattgtgtctccagcaggcctgccgcgggctccccgaagaagcccacctcgccgtatacgcgcgagaagacacagcgcagtccgccgcgcgcccctgggtactcgaggaagttggggagctcgacgatcgaacacatgcgcggcggcccagggcccgcagtcgcgcgcgtccactcgcccccctcgaccaaacatccctcgatggcctccgcggacagaacgtcgcgagggcccacatcaaatatgaggctgagaaaggacagcgacgagcgcatgcacgataccgacccccccggctccaggtcgggcgcgaactggttccgagcaccggtgaccacgatgtcgcgatcccccccgcgttccatcgtggagtgcggtggggtgcccgcgatcatatgtgccctgcgggccagagacccggcctgtttatggaccggacccccggggttagtgttgtttccgccacccacgcccccgtaccatggccccggttcccctgattaggctacgagtcgcggtgatcgcttcccaaaaaccgagctgcgtttgtctgtcttggtcttccccccccccagcccgcacaccataacaccgagaacaacacacgggggtgggcggaacataataaagctttattggtaactagttaacggcaagtccgtgggtggcgcgacggtgtcctccgggatcatctcgtcgtcctcgacgggggtgttggaatgaggcgcctcctcgcggtccacctggcgtgggccgtgcccataggcctccggcttctgtgcgtccatgggcgtaggcgcggggagactgtttccggcgtcgcggacctccaggtccctgggagcctccggtccggctaacggacgaaacgcggaagcgcgaaacacgccgtcggtgacccgcaggagctcgttcatcagtaaccaatccatactcagcgtaacggccagcccctggcgagacagatccacggagtccggaaccgcggtcgtctggcccagggggccgaggctgtagtccccccaggcccctaggtcgcgacggctcgtaagcacgacgcggtcggccgcggggctttgcgggggggcgtcctcgggcgcatgcgccattacctctcggatggccgcggcgcgctggtcggccgagctgaccaagggcgccacgaccacggcgcgctccgtctgcaggcccttccacgtgtcgtggagttcctggacaaactcggccacgggctcgggtcccgcggccgcgcgcgcggcttgatagcaggccgacagacgccgccagcgcgctagaaactgacccatgaaacaaaacccggggacctggtctcccgacagcagcttcgacgcccgggcgtgaatgccggacacgacggacagaaacccgtgaatttcgcgccggaccacggccagcacgttgtcctcgtgcgacacctgggccgccagctcgtcgcacacccccaggtgcgccgtggtttcggtgatgacggaacgcaggctcgcgagggacgcgaccagcgcgcgcttggcgtcgtgatacatgctgcagtactgactcaccgcgtcccccatggcctcggggggccagggccccaggcggtcgggcgtgtccccgaccaccgcatacaggcggcgcccgtcgctctcgaaccgacactcgaaaaaggcggagagcgtgcgcatgtgcagccgcagcagcacgatggcgtcctccagttggcgaatcagggggtcggcgcgctcggcgaggtcctgcagcaccccccgggcagccagggcgtacatgctaatcaacaggaggctggtgcccacctcggggggcggggggggctgcagttggaccaggggccgcagctgctcgacggcacccctggagatcacgtacagctcccggagcagctgctctatgttgtcggccatctgcatagtggggccgaggccgccccgggcggccggttcgaggagagtgatcagcgcgcccagtttggtgcgatggccctcgaccgtggggagatagcccagcccaaagtcccgggcccaggccaacacacgcagggcgaactcgaccgggcggggaaggtaggccgcgctacacgtggccctcagcgcgtccccaaccaccagggccagaacgtaggggacgaagcccgggtcggcgaggacgttggggtgaatgccctcgagggcggggaagcggatctgggtcgccgcggccaggtggacagagggggcatggctgggctgcccgacggggagaagcgcggacagcggcgtggccggggtggtgggggtgatgtcccagtgggtctgaccatacacgtcgatccagatgagcgccgtctcgcggagaaggctgggttgaccggaactaaagcggcgctcggccgtctcaaactcccccacgagcgcccgccgcaggctcgccagatgttccgtcggcacggccggccccatgatacgcgccagcgtctggctcagaacgccccccgacaggccgaccgcctcacagagccgcccgtgcgtgtgctcgctggcgccctggacccgcctgaaagtttttacgtagttggcatagtacccgtattcccgcgccagaccaaacacgttcgaccccgcgagggcaatgcacccaaagagctgctggacttcgccgagtccgtggccggcgggcgtccgcgcggggacgcccgccgccagaaacccctccagggccgaaaggtagtgcgtgcagtgcgagggcgtgaacccagcgtcgatcagggtgttgatcaccacggagggcgaattggtattctggatcaacgtccacgtctgctgcagcagagccagcagccgctgctgggcgccggcggagggctgctccccgagctgcagcaggctggagacggcaggctggaagactgccagtgccgacgaactcaggaacggcacgtcgggatcaaacacggccacgtccgtccgcacgcgcgccattagcgtccccgggggcgcacaggccgagcgcgggctgacgcggctgagggccgtcgacacgcgcacctcctcgcggctgcgaaccatcttgttggcctccagtggcggaatcattatggccgggtcgatctcccgcacggtgtgctgaaactgcgccaacaggggcggcgggaccacagccccccgctcgggggtcgtcaggtactcgtccaccagggccaacgtaaagagggcccgtgtgaggggagtgagggtcgcgtcgtctatgcgctggaggtgcgccgagaacagcgtcacccgattactcaccagggccaagaaccggaggccctcttgcacgaacggggcggggaagagcaggctgtacgccggggtggtaaggttcgcgctgggctgccccaacgggaccggcgccagcttgagcgacgtctccccaagggcctcgatggaggtccgcgggctcatggccaagcagctcttggtgacggtttgccagcggtctatccactccacggcgcactggcggacgcggaccggccccagggccgccgcggtgcgcaggccggcggactccagcgcatgggacgtgtcggagccggtgaccgcgaggatggtgtccttgatgacctccatctcccggaaggcctggtcgggggcctcggggagagccaccaccaagcggtgtacgagcaacccggggaggttctcggccaagagcgccgtctccggaagcccgtgggcccggtggagcgcgcacaggtgttccagcagcggccgccagcatgcccgcgcgtctgccggggcgatggccgttcccgacaacagaaacgccgccatggcggcgcgcagcttggccgtggccagaaacgccgggtcgtccgccccgtttgccgtctcggccgtgggggttggcggttggcgaaggccggctaggctcgccaataggcgctgcataggtccgtccgagggcggaccggcgggtgaggtcgtgacgacgggggcctcggacgggagaccgcggtctgccatgacgcccggctcgcgtgggtgggggacagcgtagaccaacgacgagaccgggcgggaatgactgtcgtgcgctgtagggagcggcgaattatcgatcccccgcggccctccaggaaccccgcaggcgttgcgagtaccccgcgtcttcgcggggtgttatacggccacttaagtcccggcatcccgttcgcggacccaggcccgggggattgtccggatgtgcgggcagcccggacggcgtgggttgcggactttcggcggggcggcccaaatggccctttaaacgtgtgtatacggacgcgccgggccagtcggccaacacaacccaccggaggcggtagccgcgtttggctgtggggtgggtggttccgccttgcgtgagtgtcctttcgaccccccccctcccccgggtcttgctaggtcgcgatctgtggtcgcaatgaagaccaatccgctacccgcaaccccttccgtgtggggcgggagtaccgtggaactcccccccaccacacgcgataccgcggggcagggcctgcttcggcgcgtcctgcgccccccgatctctcgccgcgacggcccagtgctccccagggggtcgggaccccggagggcggccagcacgctgtggttgcttggcctggacggcacagacgcgccccctggggcgctgacccccaacgacgataccgaacaggccctggacaagatcctgcggggcaccatgcgcgggggggcggccctgatcggctccccgcgccatcatctaacccgccaagtgatcctgacggatctgtgccaacccaacgcggatcgtgccgggacgctgcttctggcgctgcggcaccccgccgacctgcctcacctggcccaccagcgcgccccgccaggccggcagaccgagcggctgggcgaggcctggggccagctgatggaggcgaccgccctggggtcggggcgagccgagagcgggtgcacgcgcgcgggcctcgtgtcgtttaacttcctggtggcggcgtgtgccgcctcgtacgacgcgcgcgacgccgccgatgcggtacgggcccacgtcacggccaactaccgcgggacgcgggtgggggcgcgcctggatcgtttttccgagtgtctgcgcgccatggttcacacgcacgtcttcccccacgaggtcatgcggtttttcggggggctggtgtcgtgggtcacccaggacgagctagcgagcgtcaccgccgtgtgcgccgggccccaggaggcggcgcacaccggccacccgggccggccccgctcggccgtgatcctcccggcgtgtgcgttcgtggacctggacgccgagctggggctggggggcccgggcgcggcgtttctgtacctggtattcacttaccgccagcgccgggaccaggagctgtgttgtgtgtacgtgatcaagagccagctccccccgcgcgggttggagccggccctggagcggctgtttgggcgcctccggatcaccaacacgattcacggcaccgaggacatgacgcccccggccccaaaccgaaaccccgacttccccctcgcgggcctggccgccaatccccaaaccccgcgttgctctgctggccaggtcacgaacccccagttcgccgacaggctgtaccgctggcagccggacctgcgggggcgccccaccgcacgcacctgtacgtacgccgcctttgcagagctcggcatgatgcccgaggatagtccccgctgcctgcaccgcaccgagcgctttggggcggtcagcgtccccgttgtcatcctggaaggcgtggtgtggcgccccggcgagtggcgggcctgcgcgtgagcgtagcaaacgccccgcccacacaacgctccgcccccaaccccttccccgctgtcactcgttgttcgttgacccggacgtccgccaaataaagccactgaaacccgaaacgcgagtgttgtaacgtcctttgggcgggaggaagccacaaaatgcaaatgggatacatggaaggaacacacccccgtgactcaggacatcggcgtgtccttttgggtttcactgaaactggcccgcgccccacccctgcgcgatgtggataaaaagccagcgcgggtggtttagggtaccacaggtgggtgctttggaaacttgtcggtcgccgtgctcctgtgagcttgcgtccctccccggtttcctttgcgctcccgccttccggacctgctctcgcctatcttctttggctctcggtgcgattcgtcaggcagtggccttgtcgaatctcgaccccaccactcgccggacccgccgacgtcccctctcgagcccgccgaaacccgccgcgtctgttgaaatggccagccgccccgccgcatcctctcccgtcgaagcgcgggccccggttgggggacaggaggccggcggccccagcgcagccacccagggggaggccgccggggcccctctcgcccgcggccaccacgtgtactgccagcgagtcaatggcgtgatggtgctttccgacaagacgcccgggtccgcgtcctaccgcatcagcgatagcaactttgtccaatgtggttccaactgcaccatgatcatagacggagacgtggtgcgcgggcgcccccaggacccgggggccgcggcatcccccgctcccttcgttgcggtgacaaacatcggagccggcagcgacggcgggaccgccgtcgtggcattcgggggaaccccacgtcgctcggcggggacgtctaccggtacccagacgaccgacgtccccaccgaggcccttgggggcccccctcctcctccccgcttcaccctgggtggcggctgttgttcctgtcgcgacacacggcgccgctctgcggtattcgggggggagggggatcccgtcggccccgcggagttcgtctcggacgaccggtcgtccgattccgactcggatgactcggaggacaccgactcggagacgctgtcacacgcctcctcggacgtgtccggcggggccacgtacgacgacgcccttgactccgattcgtcatcggatgactccctgcagatagatggccccgtgtgtcgcccgtggagcaatgacaccgcgcccctggatgtttgccccgggacccccggcccgggcgccgacgccggtggtccctcagcggtagacccacacgcaccgacgccaggggccggcgctggtcttgcggccgatcccgccgtggcccgggacgacgcggaggggctttcggacccccggccacgtctgggaacgggcacggcctaccccgtccccctggaactcacgcccgagaacgcggaggccgtggcgcgctttctgggagatgccgtgaaccgcgaacccgcgctcatgctggagtacttttgccggtgcgcccgcgaggaaaccaagcgtgtcccccccaggacattctgcagcccccctcgcctcacggaggacgactttgggcttctcaactacgcgctcgtggagatgcagcgcctgtgtctggacgttcctccggtcctgccgaacgcatacatgccctattatctcagggagtatgtgacgcggctggtcaacgggttcaagccgctggtgagccggtccgctcgcctttaccgcatcctgggggttctggtgcacctgcggatccggacccgggaggcctcctttgaggagtggctgcgatccaaggaagtggccctggactttggcctgacggaaaggcttcgcgagcacgaagcccagctggtgatcctggcccaggctctggaccattacgactgtctgatccacagcacaccgcacacgctggtcgagcgggggctgcaatcggccctgaagtatgaggagttttacctaaagcgctttggcgggcactacatggagtccgtcttccagatgtacacccgcatcgccggctttttggcctgccgggccacgcgcggcatgcgccacatcgccctggggcgagaggggtcgtggtgggaaatgttcaagttctttttccaccgcctctacgaccaccagatcgtaccgtcgacccccgccatgctgaacctggggacccgcaactactacacctccagctgctacctggtaaacccccaggccaccacaaacaaggcgaccctgcgggccatcaccagcaacgtcagcgccatcctcgcccgcaacgggggcatcgggctatgcgtgcaggcgtttaacgactccggccccgggaccgctagcgtcatacccgccctcaaggtcctcgactcgctggtggcggcgcacaacaaagagagcgcgcgtccaaccggcgcgtgcgtgtacctggagccgtggcacaccgacgtgcgggccgtgctccggatgaagggggtcctcgccggcgaagaggcccagcgctgcgacaatatcttcagcgccctctggatgccagacctgtttttcaagcgcctgattcgccacctggacggcgagaagaacgtcacatggaccctgttcgaccgggacaccagcatgtcgctcgccgactttcacggggaggagttcgagaagctctaccagcacctcgaggtcatggggttcggcgagcagatacccatccaggagctggcctatggcattgtgcgcagtgcggccacgaccgggagccccttcgtcatgttcaaagacgcggtgaaccgccactacatctacgacacccagggggcggccatcgccggctccaacctctgcaccgagatcgtccatccggcctccaagcgatccagtggggtctgcaatctgggaagcgtgaatctggcccgatgcgtctccaggcagacgtttgactttgggcggctccgcgacgccgtgcaggcgtgcgtgctgatggtgaacatcatgatcgacagcacgctacaacccacgccccagtgcacccgcggcaacgacaacctgcggtccatgggaatcggcatgcagggcctgcacacggcctgcctgaagctggggctggatctggagtctgtcgaatttcaggacctgaacaaacacatcgccgaggtgatgctgctgtcggcgatgaagaccagcaacgcgctgtgcgttcgcggggcccgtcccttcaaccactttaagcgcagcatgtatcgcgccggccgctttcactgggagcgctttccggacgcccggccgcggtacgagggcgagtgggagatgctacgccagagcatgatgaaacacggcctgcgcaacagccagtttgtcgcgctgatgcccaccgccgcctcggcgcagatctcggacgtcagcgagggctttgcccccctgttcaccaacctgttcagcaaggtgacccgggacggcgagacgctgcgccccaacacgctcctgctaaaggaactggaacgcacgtttagcgggaagcgcctcctggaggtgatggacagtctcgacgccaagcagtggtccgtggcgcaggcgctcccgtgcctggagcccacccaccccctccggcgattcaagaccgcgtttgactacgaccagaagttgctgatcgacctgtgtgcggaccgcgccccctacgtcgaccatagccaatccatgaccctgtatgtcacggagaaggcggacgggaccctcccagcctccaccctggtccgccttctggtccacgcatataagcgcggactaaaaacagggatgtactactgcaaggttcgcaaggcgaccaacagcggggtctttggcggcgacgacaacattgtctgcacgagctgcgcgctgtgaccgacaaaccccctccgcgccaggcccgccgccactgtcgtcgccgtcccacgcgctcccccgctgccatggattccgcggccccagccctctcccccgctctgacggcccatacgggccagagcgcgccggcggacctggcgatccagattccaaagtgccccgaccccgagaggtacttctacacctcccagtgtcccgacattaaccacctgcgctccctcagcatccttaaccgctggctggaaaccgagcttgttttcgtgggggacgaggaggacgtctccaagctttccgagggcgagctcagcttttaccgcttcctcttcgctttcctgtcggccgccgacgacctggttacggaaaacctgggcggcctctccggcctgtttgagcagaaggacattctccactactacgtggagcaggaatgcatcgaagtcgtacactcgcgcgtgtacaacatcatccagctggtgctttttcacaacaacgaccaggcgcgccgcgagtacgtggccggcaccatcaaccacccggccatccgcgccaaggtggactggctggaagcgcgggtgcgggaatgcgcctccgttccggaaaagttcatcctcatgatcctcatcgagggcatcttttttgccgcctcgtttgccgccatcgcctaccttcgcaccaacaaccttctgcgggtcacctgccagtcaaacgacctcatcagccgggacgaggccgtgcacacgacggcctcgtgttacatctacaacaactacctcggcgggcacgccaagcccccgcccgaccgcgtgtacgggctgttccgccaggcggtcgagatcgagatcggatttatccgatcccaggcgccgacggacagccatatcctgagcccggcggcgctggcggccatcgaaaactacgtgcgattcagcgcggatcgcctgttgggccttatccacatgaagccactgttttccgccccaccccccgacgccagctttccgctgagcctcatgtccaccgacaaacacaccaattttttcgagtgtcgcagcacctcctacgccggggcggtcgtcaacgatctgtgagggtcgcggcgcgcttctacccgtgtttgcccataataaacctctgaaccaaactttgggtctcattgtgattcttgtcagggacgcgggggtgggagaggataaaaggcggcgcaaaaagcagtaaccaggtccgtccagattctgagggcataggataccataattttattggtgggtcgtttgttcggggacaagcgcgctcgtctgacgtttgggctactcgtcccagaatttggccaggacgtccttgtagaacgcgggtgggggggcctgggtccgcagctgctccagaaacctgtcggcgatatcaggggccgtgatatgccgggtcacaatagatcgcgccaggttttcgtcgcggatgtcctggtagataggcaggcgtttcagaagagtccacggcccccgctccttggggccgataagcgatatgacgtacttaatgtagcggtgttccaccagctcggtgatggtcatgggatcggggagccagtccagggactctggggcgtcgtggatgacgtggcgtcgccggctggccacataactgcggtgctcttccagcagctgcgcgttcgggacctggacgagctcgggcggggtgagtatctccgaggaggacgacctggggccggggtggcccccggtaacgtcccggggatccagggggaggtcctcgtcgtcttcgtatccgccggcgatctgttgggttagaatttcggtccacgagacgcgcatctcggtgccgccggcggccggcggcaaagggggcctggtttccgtggagcgcgagctggtgtgttcccggcggatggcccgccgggtctgagagcgactcgggggggtccagtgacattcgcgcagcacatcctccacggaggcgtaggtgttattgggatggaggtcggtgtggcagcggacaaagagggccaggaactgggggtagctcatcttaaagtactttagtatatcgcgacagttgatcgtgggaatgtagcaggcgctaatatccaacacaatatcacagcccatcaacaggaggtcagtgtctgtggtgtacacgtacgcgaccgtgttggtgtgatagaggttggcgcaggcatcgtccgcctccagctgacccgagttaatgtaggcgtaccccagggcccggagaacgcgaatacagaacagatgcgccagacgcagggccggcttcgagggcgcggcggacggcagcgcggctccggacccggccgtcccccgggtccccgaggccagagaggtgccgcgccggcgcatgttggaaaaggcagagctgggtctggagtcggtgatgggggaaggcggtggagaggcgtccacgtcactggcctcctcgtccgtccggcattgggccgtcgtgcgggccaggatggccttggctccaaacacaaccggctccatacaattgaccccgcgatcggtaacgaagatggggaaaagggacttttgggtaaacacctttaataagcgacagaggcagtgtagcgtaatggcctcgcggtcgtaactggggtatcggcgctgatatttgaccaccaacgtgtacatgacgttccacaggtccacggcgatgggggtgaagtacccggccggggccccaaggccctggcgcttgaccagatggtgtgtgtgggcaaacttcatcatcccgaacaaacccatgtcaggtcgattgtaactgcggatcggcctaactaaggcgtggttggtgcgacggtccgggacacccgagcctgtctctctgtgtatggtgacccagacaacaacaccgacacaagaggacaataatccgttaggggacgctctttataatttcgatggcccaactccacgcggattggtgcagcaccctgcatgcgccggtgtgggccaaacttccccccgctcattgcctcttccaaaagggtgtggcctaacgagctgggggcgtatttaatcaggctagcgcggcgggcctgccgtagtttctggctcggtgagcgacggtccggttgcttgggtcccctggctgccagcaaaaccccaccctcgcagcggcatacgccccctccgcgtcccgcacccgagaccccggcccggctgccctcaccaccgaagcccacctcgtcactgtggggtgttcccagcccgcattgggatgacggattcccctggcggtgtggcccccgcctcccccgtggaggacgcgtcggacgcgtccctcgggcagccggaggagggggcgccctgccaggtggtcctgcagggcgccgaacttaatggaatcctacaggcgtttgccccgctgcgcacgagccttctggactcgcttctggttatgggcgaccggggcatccttatccataacacgatctttggggagcaggtgttcctgcccctggaacactcgcaattcagtcggtatcgctggcgcggacccacggcggcgttcctgtctctcgtggaccagaagcgctccctcctgagcgtgtttcgcgccaaccagtacccggacctacgtcgggtggagttggcgatcacgggccaggccccgtttcgcacgctggttcagcgcatatggacgacgacgtccgacggcgaggccgttgagctagccagcgagacgctgatgaagcgcgaactgacgagctttgtggtgctggttccccagggaacccccgacgttcagttgcgcctgacgaggccgcagctcaccaaggtccttaacgcgaccggggccgatagtgccacgcccaccacgttcgagctcggggttaacggcaaattttccgtgttcaccacgagtacctgcgtcacatttgctgcccgcgaggagggcgtgtcgtccagcaccagcacccaggtccagatcctgtccaacgcgctcaccaaggcgggccaggcggccgccaacgccaagacggtgtacggggaaaatacccatcgcaccttctctgtggtcgtcgacgattgcagcatgcgggcggtgctccggcgactgcaggtcgccgggggcaccctcaagttcttcctcacgacccccgtccccagtctgtgcgtcaccgccaccggtcccaacgcggtatcggcggtatttctcctgaaaccccagaagatttgcctggactggctgggtcatagccaggggtctccttcagccgggagctcggcctcccgggcctctgggagcgagccaacagacagccaggactccgcgtcggacgcggtcagccacggcgatccggaagacctcgatggcgctgcccgggcgggagaggcgggggcctcgcacgcctgtccgatgccgtcgtcgaccacgcgggtcactcccacgaccaagcgggggcgctcggggggcgaggatgcgcgcgcggacacggccctaaagaaacctaagacggggtcgcccaccgcacccccgcccacagatccagtccccctggacacggaggacgactccgatgcggcggacgggacggcggcccgtcccgccgctccagacgcccggagcggaagccgttacgcgtgttactttcgcgacctcccgaccggagaagcaagccccggcgccttctccgccttccgggggggcccccaaaccccgtatggttttggattcccctgacggggcggggccttggcggccgcccaactctcgcaccatcccgggttaatgtaaataaacttggtattgcccaacactctcccgcgtgtcgcgtgtggttcatgtgtgtgcctggcgtcccccaccctcgggttcgtgtatttcctttccctgtccttataaaagccgtatgtggggcgctgacggaaccaccccgcgtgccatcacggccaaggcgcgggatgctccgcaacgacagccaccgggccgcgtccccggaggacggccagggacgggtcgacgacggacggccacacctcgcgtgcgtgggggccctggcgcgggggttcatgcatatctggcttcaggccgccacgctgggttttgcgggatcggtcgttatgtcgcgcgggccgtacgcgaatgccgcgtctggggcgttcgccgtcgggtgcgccgtgctgggctttatgcgcgcaccccctcccctcgcgcggcccaccgcgcggatatacgcctggctcaaactggcggccggtggagcggcccttgttctgtggagtctcggggagcccggaacgcagccgggggccccgggcccggccacccagtgcctggcgctgggcgccgcctatgcggcgctcctggtgctcgccgatgacgtctatccgctctttctcctcgccccggggcccctgttcgtcggcaccctggggatggtcgtcggcgggctgacgatcggaggcagcgcgcgctactggtggatcggtgggcccgccgcggccgccttggccgcggcggtgttggcgggcccgggggcgaccaccgccagggactgcttctccagggcgtgccccgaccaccgccgcgtctgcgtcatcgtcgcaggcgagtctgtttcccgccgccccccggaggacccagagcgacccggggaccccgggccaccgtcccccccgacaccccaacgatcccaggggccgccggccgatgaggtcgcaccggccggggtagcgcggcccgaaaacgtctgggtgcccgtggtcacctttctgggggcgggcgcgctcgccgtcaagacggtgcgagaacatgcccgggaaacgccgggcccgggcctgccgctgtggccccaggtgtttctcggaggccatgtggcggtggccctgacggagctgtgtcaggcgcttatgccctgggaccttacggacccgctgctgtttgttcacgccggactgcaggtcatcaacctcgggttggtgtttcggttttccgaggttgtcgtgtatgcggcgctagggggtgccgtgtggatttcgttggcgcaggtgctggggctccggcgtcgcctgcacaggaaggaccccggggacggggccaggttggcggcgacgcttcggggcctcttcttctccgtgtacgcgctggggtttggggtgggggcgctgctgtgccctccggggtcaacgggcgggtggtcgggcgattgatatatttttcaataaaaggcattagtcccgaagaccgccggtgtgtgatgatttcgccataacacccaaaccccggatggggcccgggtataaattccggaaggggacacgggctaccctcactaccgagggcgcttggtcgggaggccgcatcgaacgcacacccccatccggtggtccgtgtggaggtcgtttttcagtgcccggtctcgctttgccgggaacgctagccgatccctcgcgagggggaggcgtcgggcatggccccggggcgggtgggccttgccgtggtcctgtggagcctgttgtggctcggggcgggggtggccgggggctcggaaactgcctccaccgggcccacgatcaccgcgggagcggtgacgaacgcgagcgaggcccccacatcggggtcccccgggtcagccgccagcccggaagtcacccccacatcgaccccaaaccccaacaatgtcacacaaaacaaaaccacccccaccgagccggccagccccccaacaacccccaagcccacctccacgcccaaaagcccccccacgtccacccccgaccccaaacccaagaacaacaccacccccgccaagtcgggccgccccactaaaccccccgggcccgtgtggtgcgaccgccgcgacccattggcccggtacggctcgcgggtgcagatccgatgccggtttcggaattccacccgcatggagttccgcctccagatatggcgttactccatgggtccgtcccccccaatcgctccggctcccgacctagaggaggtcctgacgaacatcaccgccccacccgggggactcctggtgtacgacagcgcccccaacctgacggacccccacgtgctctgggcggagggggccggcccgggcgccgaccctccgttgtattctgtcaccgggccgctgccgacccagcggctgattatcggcgaggtgacgcccgcgacccagggaatgtattacttggcctggggccggatggacagcccgcacgagtacgggacgtgggtgcgcgtccgcatgttccgccccccgtctctgaccctccagccccacgcggtgatggagggtcagccgttcaaggcgacgtgcacggccgccgcctactacccgcgtaaccccgtggagtttgtctggttcgaggacgaccgccaggtgtttaacccgggccagatcgacacgcagacgcacgagcaccccgacgggttcaccacagtctctaccgtgacctccgaggctgtcggcggccaggtccccccgcggaccttcacctgccagatgacgtggcaccgcgactccgtgatgttctcgcgacgcaatgccaccgggctggccctggtgctgccgcggccaaccatcaccatggaatttggggtccggcatgtggtctgcacggccggctgcgtccccgagggcgtgacgtttgcctggttcctgggggacgacccctcaccggcggctaagtcggccgttacggcccaggagtcgtgcgaccaccccgggctggctacggtccggtccaccctgcccatttcgtacgactacagcgagtacatctgtcggttgaccggatatccggccgggattcccgttctagagcaccacggcagtcaccagcccccacccagggaccccaccgagcggcaggtgatcgaggcgatcgagtgggtggggattggaatcggggttctcgcggcgggggtcctggtcgtaacggcaatcgtgtacgtcgtccgcacatcacagtcgcggcagcgtcatcggcggtaacgcgagacccccccgttacctttttaatatctatatagtttggtccccctctatcccgcccaccgctgggcgctataaagccgccaccctctcttccctcaggtcatccttggtcgatcccgaacgacacacggcgtggagcaaaacgcctccccctgagccgctttcctaccaacacaacggcatgcctctgcgggcatcggaacacgcctaccggcccctgggccccgggacaccccccatgcgggctcggctccccgccgcggcctgggttggcgtcgggaccatcatcgggggagttgtgatcattgccgcgttggtcctcgtgccctcgcgggcctcgtgggcactttccccatgcgacagcggatggcacgagttcaacctcgggtgcatatcctgggatccgacccccatggagcacgagcaggcggtcggcggctgtagcgccccggcgaccctgatcccccgcgcggctgccaaacagctggccgccgtcgcacgcgtccagtcggcaagatcctcgggctactggtgggtgagcggagacggcattcgggcctgcctgcggctcgtcgacggcgtcggcggtattgaccagttttgcgaggagcccgcccttcgcatatgctactatccccgcagtcccgggggctttgttcagtttgtaacttcgacccgcaacgcgctggggctgccgtgaggcgcgtgtactgcggtctgtctcgtctcctcttctccccttccctccccctccgcatcccaggatcacaccggccaacgagggttgggggggtccggcacggacccaaaataataaacacacaatcacgtgcgataaaaagaacacgcggtcccctgtggtgtttttggttatttttattaaatctcgtcgacaaacagggggaaaggggcgtggtctagcgacggcagcacgggcggaggcgttcaccggctccggcgtccttcgcgtttaagcttggtcaggagggcgctcagggcggcgacgttggtcgggccgtcgttggtcagggcgttggctcgatggcgggcgaggacgggcgaggggctcaacggcgggggcgggggtccggtgcggcccgggggggaaaatagggcggatcccccccagtcgtacaggggattttccgcctcaatgtacggggaggccggcgctgcattcgccgtgttcacgcagacgttttcgtagacccgcatccatggtatttcctcgtagacacgccccccgtcctcgctcacggtctcgtatattgactcgtcgtcctcgtagggggcgtgccgttcgcgggccgaggcggcgtgggtggctttgcggcgggcgtcgtcgtcgtcgtcgtcggccgtcagatacgtggcttccatctggtcgggttctccctccggggcgggtccccacacccgtggccgatcgaggctccccagagacgcgcgccggacaagaagggggcacgtcgccgccggcggtcgcctgtcgggtcccgcgacgttacgggccgggaggcgcgggggcacctcccccatgtgcgtgtaatacgtggccggctgtgcggccgcagcggggggctcggcgaccgggtcgtccgcatccggaagcgggggccccgcgccgtccgcacggcgcctccggaaccgccgggtggacggcgcgggggtcgagtgtaggcgaggtcgggggaggggcgggggctcgttgtcgcgccgcgcccgctgaatcttttcccgacaggtcccaccccccgcgcgatgcccccccgggccgcgggccatgtcgtccgggggaggccccgcggaccacgtcgtccggcgagacgccacgagccgcaggatggactcgtagtggagcgacggcgccccgctgcggagcagatccgcggccagggcggccccgaaccaagccttgatgctcaactccatccgggcccagctgggggcggtcatcgtggggaacaggggggcggtggtccgacagaaacgctcctggctgtccaccgcggcccgcagatactcgttgttcaggctgtcggtggcccagacgccgtacccggtgagggtcgcgttgatgatatactgggcgtggtgatggacgatcgacagaacctccaccgtggataccacggtatccacggtcccgtacgtaccgccgctccgcttgccggtctgccacaggttggctaggcacgtcaggtggcccaggacgtcgctgaccgccgccctgagcgccatgcactgcatggagccggtcgtgccgctgggaccccggtccagatggcgcgcgaacgtttccgcgggcgcctccgggctgccgccgagcgggaggaaccggcgattggagggactcagccggtgacatacgtgcttgtccgtcgtccacagcatccaggacgcccaccggtacagcacggagacgtaggccaggagctcgttgagccgcagtgcggtgtcggtgctggggcggcttgggtccgccgggcgcataaagaacatgtactgctgaatccgatggagggcgtcgcgcaggccggccacggtggcggcgtacttggccgccgcggccccgctcttgaacggggtgcgcgccagcagctttggcgccagggtgggccgcagcagcacgtgaaggctggggtcgcagtcgcccacggggtcctcggggacgtccaggccgctgggcaccaccgtctgcaggtacttccagtactgcgtgaggatggcgcggctcaactggccgccgggcagctccacctcgcccagcgcctgggtggcggccgaagcgtagtgccggatgtactcgtagtgcgggtcgctggcgagcccgtccacgatcaaactctcgggaaccgtgttgtgttgccgcgcggccaaccggacgctgcgatcggtgcaggtcagaaacgccggctgcgcgtcgtcggagcgctgccgcaaggcgcccacggccgcgctaaggagcccctccggggtggggagcagacacccgccgaagatgcgccgctcgggaacgcccgcgttgtcgccgcggatcaggttggcaggcgtcaggcaccgcgccagccgcagggagctcgcgccgcgcgtccggcgctgcatggtgacgcccgttcggtcgggacccgccggtcggagttatgccgcgtccagggccatcggggcgctttttatcgggaggagcttatgggcgtggcgggcctcccagcccggtcgcgcgcctccccgacacgtgcgcccgcagggcggcggccccctcgtctcccatcagcagtttcctaaactgggacatgatgtccaccacgcggacccgcgggcccaacacggacccgccgcttacgggggcgggggggaagggctccaggtccttgagcagaaaggcggggtctgccgtcccggacacgggggcccggggcgcggaggaggcggggcgcagatccacgtgctccgcggccgcgcggacgtccgcccagaacttggcgggggtggtgcgcgcgtacaggggctgggtcgctcggaggacacacgcgtagcgcaggggggtgtacgtgcccacctcgggggccgtgaatcccccgtcaaacgcggccagtgtcacgcacgccaccacggtgtcggcaaagcccagcagccgctgcaggacgagcccggcggccagaatggcgcgcgtggtcgcagcgtcgtcccggcgccggtgcgcgtccccgcacgcccgggcgtactttaaggtcactgtcgccagggccgtgtgcagcgcgtacaccgcagcgcccagcacggcgttgagcccgctgttggcgagcagccggcgcgctgcggtgtcgcccagcgcctcgtgctcggcccccacgaccgcggggcttcccaggggcagggcgcgaaacagctcctcccgcgccacgtccgcaaaggcggggtggtgcacgtgcgggtgcaggcgcgcccccacgaccaccgagagccactggaccgtctgctccgccatcaccgccaacacatccagcacgcgccccaggaaggcggcctcccgcgtcaaaacgcaccggacggcgtcgggattgaagcgggcgagcagggccccggtggccaggtacgtcatgcggccggcatagcgggcggccacgcgacagtcgcggtccagcagcgcgcgcaccccgggccagtacagcagggaccccagcgagctgcgaaacaccgcggcgtcggggccggattggggggacactaacccccccgcgctcagtaacggcacggccgcggccccgacgggacgcaacgccgtgaggctcgcgaactgccgcctcagctcggcagccctgtcgtccaggtccgacccgcgcgcctctgcgtgaaggcgcgtcccgcacacccacccgttgatggccagccgcacgacggcatccgccaaaaagctcatcgcctgggcggggctggtttttgttcgacgatccgtcaggtcaagaatcccatcgcccgtgatataccaggccaacgcctcgccctgctgcagggtttggcggaaaaacaccgcggggttgtcgggggaggcgaagtgcatgacccccacgcgcgataacccgaacgcgctatccggacacgggtaaaacccggccggatgccccagggctagggcggagcgcacggactcgtcccacacggcaacctgaggggccagtcgatccaacgggaatgccgcccggagctccgggcccggcacgcgtccctccagaacctccaccttgggcggggaacgggccccgccgccgtcctccggcccgacgtcttccgggtagtcgtcctcctcgtactgcagttcctctaggaacagcggcgacggcgccacccgcgaaccgccgacccgccccaaaatagcccgcgcgtcgacgggacccaggtatcccccctgccgggcctgcggaggaccgcggggaacctcatcatcatcgtccaggcgaccgcgcaccgactggctacgggccgcatcgggcccggggcgctgccgggacgctcggcgatgggatgagggcggggcttccgacgcgcgccgtcgtcgggctcgcgggccttcccgtcgacggcgcacgggcggctcgtcgcccgccatctcctccagagcctctagctcgctgtcgtcatccccgcggaacaccgcacgcaggtaccccatgaaccccaccccatcgcccgctggctcgtccgccacgggcgaggcgcgggggcgggtggatgcgcgcctcctgcgccccgcgggttcgcgagccgacatggtggcgatagacgcgggttatcggatgtccgctaccccccaaaaaagaaaaagaccccacagcgcggatggaggtcggggtaggtgccgccggaccccctcgcgatgggaatggacgggagcgacggggccggcgcaaaaaacgcagtatctcccgcgaaggctacccgccgccccagcccccggccaaatgcggaaacggtcccgcgctctcgcctttatacgcgggccgccctgcgacacaatcacccgtccgtggtttcgaatctacacgacaggcccgcagacgcggctaacacacacgccggcaacccagaccccagtgggttggttgcgcggtcccgtctcctggctagttctttcccccaccaccaaataatcagacgacaaccgcaggtttttgtaatgtatgtgctcgtgtttattgtggatacgaaccggggacgggaggggaaaacccagacgggggatgcgggtccggtcgcgccccctatgggtggggttgatacgggaaagacgatatcgggcttttgatgcgatcgtccccgcccgcccagagagtgtgggacgcccgacggcgcgggaagagaaaaacccccaaacgcgttagaggaccggacggaccttatggggggaagtgggcagcgggaaccccgtccgttcccgaggaatgacagcccgtggtcgccaccccgcatttaagcaacccgcacgggccgccccgtacctcgtgacttccccccacattggctcctgtcacgtgaaggcaaaccgagggcggctgtccaacccaccccccgccacccagtcacggtccccgtcggattgggaaacaaaggcacgcaacgccaacaccgaatgaacccctgttggtgctttattgtctgggtacggaagtttttcactcgacgggccgtctggggcgagaagcggagcgggctggggctcgaggtcgctcggtggggcgcgacgccgcagaacgccctcgagtcgccgtggccgcgtcgacgtcctgcaccacgtctggattcaccaactcgttggcgcgctgaatcaggtttttgccctcgcagaccgtcacgcggatggtggtgatgccaaggagttcgttgaggtcttcgtctgtgcgcggacgcgacatgtcccagagctggaccgccgccatccgggcatgcatggccgccaggcgcccaaccgcggcgcagaagacgcgcttgttaaagccggccacccggggggtccatggcgcgtcggggtttgggggggcggtgctaaagtgcagctttctggccagcccctgcgcgggtgtcttggatcgggttggcgccgtcgacgcgggggcgtctgggagtgcggcggattctggctgggccgatttcctgccgcgggtggtctccgccgccggggccgcgggggccttagtcgccacccgctgggttcggggggcccggggggcggtggtgggtgtgcgtccggcccctccggacccagcgggcggcggaggcgcccgcgcaggccccggggcggacaaaaccgccccggaaacgggacgccgcgtccgggggacctccgggtgttcgtcgtcttcggatgacgagcccccgtagagggcataatccgactcgtcgtactggacgaaacggacctcgccccttgggcgcgcgcgtgtctgtagggcgccacggcgggaggtgtcaggcggactatcgggactcgccatacatgaagacggggtgtagtacagatcctcgtactcatcgcgcggaacctcccgcggacccgacttcacggagcggcgagaggtcatggttccacgaacacgctagggtcggatgcgcggacaattaggcctgggttcggacggcgggggtggtgcaggtgtggagaggtcgagcgataggggcggcccgggagagaagagagggtccgcaaaacccactggggatgcgtgagtggccctctgtgggcggtgggggagagtcttataggaagtgcatataaccacaacccatgggtctaaccaatccccaggggccaagaaacagacacgccccaaacggtctcggtttccgcgaggaaggggaagtcctgggacaccctccacccccacccctcaccccacacagggcgggttcaggcgtgcccggcagccagtagcctctggcagatctgacagacgtgtgcgataatacacacgcccatcgaggccatgcctacataaaagggcaccagggcccccggggcagacatttggccagcgttttgggtctcgcaccgcgcgcccccgatcccatcgcgcccgccctcctcgccgggcggctccccgtgcgggcccgcgtctcccgccgctaaggcgacgagcaagacaaacaacaggcccgcccgacagacccttctgggggggcccatcgtccctaacaggaagatgagtcagtggggatccggggcgatccttgtccagccggacagcttgggtcgggggtacgatggcgactggcacacggccgtcgctactcgcgggggcggagtcgtgcaactgaacctggtcaacaggcgcgcggtggcttttatgccgaaggtcagcggggactccggatgggccgtcgggcgcgtctctctggacctgcgaatggctatgccggctgacttttgtgcgattattcacgcccccgcgctatccagcccagggcaccacgtaatactgggtcttatcgactcggggtaccgcggaaccgttatggccgtggtcgtagcgcctaaaaggacgcgggaatttgcccccgggaccctgcgggtcgacgtgacgttcctggacatcctggcgacccccccggccctcaccgagccgatttccctgcggcagttcccgcaactggcgcccccccctccaaccggggccgggatacgcgcagatccttggttggagggggcgctcggggacccaagcgtgactcctgccctaccggcgcgacgccgagggcggtccctcgtctatgccggcgagctgacgccggttcagacggaacacggggacggcgtacgagaagccatcgccttccttccaaaacgcgaggaggatgccggtttcgacattgtcgtccgtcgcccggtcaccgtcccggcaaacggcaccacggtcgtgcagccatccctccgcatgctccacgcggacgccgggcccgcggcctgctatgtgctggggcggtcgtcgctcaacgcccgcggcctcctggtcgttcctacgcgctggctccccgggcacgtatgtgcgtttgttgtttacaaccttacgggggttcctgtgaccctcgaggccggcgccaaggtcgcccagctcctggttgcgggggcggacgctcttccttggatccccccggacaactttcacgggaccaaagcgcttcgaaactaccccaggggtgttccggactcaaccgccgaacccaggaacccgccgctcctggtgtttacgaacgagtttgacgcggaggcccccccgagcgagcgcgggaccgggggttttggctctaccggtatttagcccatagcttggggttcgttccgggcaataaaaaacgtttgtatctcatctttcctgtgtgtagttgtttctgttggatgcctgtgggtctatcacacccgcccctccatcccacaaacacagaacacacgggttggatgaaaacacgcatttattgacccaaaacacacggagctgctcgagatgggccagggcgaggtgcggttggggaggctgtaggtctgggaacggacacgcggggacacgattccggtttggggtccgggagggcgtcgccgtttcgggcggcaggcgccagcgtaacctccgggggcggcgtgtgggggtgccccaaggagggcgcctcggtcaccccaagcccccccgagcgggttcccccggcaaccccgaaggcggagaggccaagggcccgttcggcgatggccacatcctccatgaccacgtcgctctcggccatgctccgaatagcctgggagacgagcacatccgcggacttgtcagccgcccccacggacatgtacatctgcaggatggtggccatacacgtgtccgccaggcgccgcatcttgtcctgatgggccgccacggccccgtcgatcgtgggggcctcgagcccggggtggtggcgcgccagtcgttctaggttcaccatgcaggcgtggtacgtgcgggccaaggcgcgggccttcacgaggcgtcgggtgtcgtccagggaccccagggcgtcatcgagcgtgatgggggcgggaagtagcgcgttaacgaccaccagggcctcctgcagccgcggctccgcctccgagggcggaacggccgcgcggatcatctcatattgttcctcggggcgcgctccccagccacatatagccccgagaagagaagccatcgcgggcgggtactggcccttgggcgcgcggacgcaatggggcaggaagacgggaaccgcggggagaggcgggcggccgggactcccgtggaggtgaccgcgctttatgcgaccgacgggtgcgttattacctcttcgatcgccctcctcacaaactctctactgggggccgagccggtttatatattcagctacgacgcatacacgcacgatggccgtgccgacgggcccacggagcaagacaggttcgaagagagtcgggcgctctaccaagcgtcgggcgggctaaatggcgactccttccgagtaaccttttgtttattggggacggaagtgggtgggacccaccaggcccgcgggcgaacccgacccatgttcgtctgtcgcttcgagcgagcggacgacgtcgccgcgctacaggacgccctggcgcacgggaccccgctacaaccggaccacatcgccgccaccctggacgcggaggccacgttcgcgctgcatgcgaacatgatcctggctctcaccgtggccgtcaacaacgccagcccccgcaccggacgcgacgccgccgcggcgcagtatgatcagggcgcgtccctacgctcgctcgtggggcgcacgtccctgggacaacgcggccttaccacgctatacgtccaccacgaggcgcgcgtgctggccgcgtaccgcagggcgtattatggaagcgcgcagagtcccttctggtttcttagcaaattcgggcctgacgaaaaaagcctggtgctcaccactcggtactacctgcttcaggcccagcgtctggggggcgcgggggccacgtacgacctgcaggccatcaaggacatctgcgccacctacgcgattccccacgccccccgccccgacaccgtcagcgccgcgtccctgacctcgtttgccgccatcacgcggttctgttgcacgagccagtacgcccgcggggccgcggcggccgggtttccgctttacgtggagcgccgtattgcggccgacgtccgcgagaccagtgcgctggagaagttcataacccacgatcgcagttgcctgcgcgtgtccgaccgtgaattcattacgtacatttacctggcccattttgagtgtttcagccccccgcgcctagccacgcatcttcgggccgtgacgacccaggaccccaaccccgcggccaacacggagcagccctcgcccctgggcagggaggccgtggaacaatttttttgccacgtgcgcgcccaactgaatatcggggagtacgtcaaacacaacgtgaccccccgggagaccgtcctggatggcgatacggccaaggcctacctgcgcgctcgcacgtacgcgcccggggccctgacgcccgcccccgcgtattgcggggccgtggactccgccaccaaaatgatggggcgtttggcggacgccgaaaagctcctggtcccccgcgggtggcccgcgtttgcgcccgccagtcccggggaggatacggcgggcggcacgccgcccccacagacctgcggaatcgtcaagcgcctcctgagactggccgccacggaacaacaggacaccacgcccccggcgatcgcggcgcttatccgtaatgcggcggtgcagactcccctgcccgtctaccggatatccatggtccccacgggacaggcatttgccgcgctggcctgggacgactgggcccgcataacgcgggacgctcgcctggccgaagcggtcgtgtccgccgaagcggcggcgcaccccgaccacggcgcgctgggcaggcggctcacggatcgcatccgcgcccagggccccgtgatgccccctggcggcctggatgccggggggcagatgtacgtgaatcgcaacgagatatttaacggcgcgctggcaatcacaaacatcatcctggatctcgacatcgccctgaaggagcccgtcccctttcgccggctccacgaggccctgggccactttaggcgcggggctctggcggcggttcagctcctgtttcccgcggcccgcgtggaccccgacgcatatccctgttattttttcaaaagcgcatgtcggcccggcccggcgtccgtgggttccggcagcggactcggcaacgacgacgacggggactggtttccctgctacgacgacgccggtgatgaggagtgggcggaggacccgggcgccatggacacatcccacgatcccccggacgacgaggttgcctactttgacctgtgccacgaagtcggccccacggcggaacctcgcgaaacggattcgcccgtgtgttcctgcaccgacaagatcggactgcgggtgtgcatgcccgtccccgccccgtacgtcgtccacggttctctaacgatgcggggggtggcacgggtcatccagcaggcggtgctgttggaccgagattttgtggaggccatcgggagctacgtaaaaaacttcctgttgatcgatacgggggtgtacgcccacggccacagcctgcgtttgccgtattttgccaaaatcgcccccgacgggcctgcgtgcggaaggctgctgccagtgtttgtgatcccccccgcctgcaaagacgttccggcgtttgtcgccgcgcacgccgacccgcggcgcttccattttcacgccccgcccacctatctcgcttccccccgggagatccgtgtcctgcacagcctgggtggggactatgtgagcttctttgaaaggaaggcgtcccgcaacgcgctggaacactttgggcgacgcgagaccctgacggaggtcctgggtcggtacaacgtacagccggatgcgggggggaccgtcgaggggttcgcatcggaactgctggggcggatagtcgcgtgcatcgaaacccactttcccgaacacgccggcgaatatcaggccgtatccgtccggcgggccgtcagtaaggacgactgggtcctcctacagctagtccccgttcgcggtaccctgcagcaaagcctgtcgtgtctgcgctttaagcacggccgggcgagtcgcgccacggcgcggacattcgtcgcgctgagcgtcggggccaacaaccgcctgtgcgtgtccttgtgtcagcagtgctttgccgccaaatgcgacagcaaccgcctgcacacgctgtttaccattgacgccggcacgccatgctcgccgtccgttccctgcagcacctctcaaccgtcgtcttgataacggcgtacggcctcgtgctcgtgtggtacaccgtcttcggtgccagtccgctgcaccgatgtatttacgcggtacgccccaccggcaccaacaacgacaccgccctcgtgtggatgaaaatgaaccagaccctattgtttctgggggccccgacgcacccccccaacgggggctggcgcaaccacgcccatatctgctacgccaatcttatcgcgggtagggtcgtgcccttccaggtcccacccgacgccacgaatcgtcggatcatgaacgtccacgaggcagttaactgtctggagaccctatggtacacacgggtgcgtctggtggtcgtagggtggttcctgtatctggcgttcgtcgccctccaccaacgccgatgtatgtttggtgtcgtgagtcccgcccacaagatggtggccccggccacctacctcttgaactacgcaggccgcatcgtatcgagcgtgttcctgcagtacccctacacgaaaattacccgcctgctctgcgagctgtcggtccagcggcaaaacctggttcagttgtttgagacggacccggtcaccttcttgtaccaccgccccgccatcggggtcatcgtaggctgcgagttgatgctacgctttgtggccgtgggtctcatcgtcggcaccgctttcatatcccggggggcatgtgcgatcacataccccctgtttctgaccatcaccacctggtgttttgtctccaccatcggcctgacagagctgtattgtattctgcggcggggcccggcccccaagaacgcagacaaggccgccgccccggggcgatccaaggggctgtcgggcgtctgcgggcgctgttgttccatcatcctgtcgggcatcgcaatgcgattgtgttatatcgccgtggtggccggggtggtgctcgtggcgcttcactacgagcaggagatccagaggcgcctgtttgatgtatgacgtcacatccaggccggcggaaaccggaacggcatatgcaaactggaaactgtcctgtcttggggcccacccacccgacgcgtcatatgtaaatgaaaatcgttcccccgaggccatgtgtagcctggatcccaacgaccccgcccatgggtcccaattggccgtcccgttaccaagaccaacccagccagcgtatccacccccgcccgggtccccgcggaagcggaacggtgtatgtgatatgctaattaaatacatgccacgtacttatggtgtctgattggtccttgtctgtgccggaggtggggcgggggccccgcccggggggcggaactaggaggggtttgggagagccggccccggcaccacgggtataaggacatccaccacccggccggtggtggtgtgcagccgtgttccaaccacggtcacgcttcggtgcctctccccgattcgggcccggtcgcttgctaccggtgcgccaccaccagaggccatatccgacaccccagccccgacggcagccgacagcccggtcgtacaataaaaacaaaacatttcaaacaaatcgccccacgtgttgtccttctttgctcatggccggcggggcgtgggtcacggcagatggcgggggtgggcccggcgtacggcctgggtgggcggagggaactaacccaacgtataaatccgtccccgctccaaggccggtgtcatagtgcccttaggagcttcccgcccgggcgcatccccccttttgcactatgacagcgacccccctcaccaacctgttcttacgggccccggacataacccacgtggcccccccttactgcctcaacgccacctggcaggccgaaacggccatgcacaccagcaaaacggactccgcttgcgtggccgtgcggagttacctggtccgcgcctcctgtgagaccagcggcacaatccactgctttttctttgcggtatacaaggacacccaccatacccctccgctgattaccgagctccgcaactttgcggacctggttaaccacccgccggtcctacgcgaactggaggataagcgcggggtgcggctgcggtgtgcgcggccgtttagcgtcgggacgattaaggacgtctctgggtccggcgcgtcctcggcgggagagtacacgataaacgggatcgtgtaccactgccactgtcggtatccgttctcaaaaacatgctggatgggggcctccgcggccctacagcacctgcgctccatcagctccagcggcatggccgcccgcgcggcagagcatcgacgcgtcaagattaaaattaaggcgtgatctccaaccccccatgaatgtgtgtaaccccccccccaaaaaaataaagagccgtaacccaaccaaaccaggcgtggtgtgagtttgtggacccaaagccctcagagacaatgcgacaggccagtatggaccgtgatacttttatttattaactcacaggggcgcttaccgccacaggaataccagaataatgaccaccacaatcgcgaccaccccaaatacagcatggcgccacaccacgccacaacagccctgtcgccggtatggggcatgatcagacgagccgcgcgccgcgcgttgggccctgtacagctcgcgcgaattgaccctaggaggccgccacgcgcccgagttttgcgttcgtcgctggtcgtcgggcgccaaagccccggacggctgttcggtcgaacgaacggccacgacagtggcataggttggggggtggtccgacatagcctcggcgtacgtcgggaggcccgacaagaggtcccttgtgatgtcgggtggggccacaagcctggtttccggaagaaacaggggggttgccaataacccgccagggccaaaactccggcgctgcgcacgtcgttcggcgcggcgccgggcgcgccgagcggctcgctgggcggcttggcgtgagcggccccgctccgacgcctcgccctctccggaggaggttggcggaattggcacggacgacaggggcccagcagagtacggtggaggtgggtccgtgggggtgtccagatcaataacgacaaacggcccctcgttcctaccagacaagctatcgtaggggggcgggggatcagcaaacgcgttccccgcgctccatagacccgcgtcgggttgcgccgcctccgaagccatggatgcgccccaaagccacgactcccgcgcgctaggtccttggggtaagggaaaaggccctactccccatccaagccagccaagttaacgggctacgccttcggggatgggactggcaccccggcggattttgttgggctggtacgcgtcgcccaaccgagggccgcgtccacgggacgcgccttttataaccccgggggtcattcccaacgatcacatgcaatctaacgagtcttcggacctcgcgggggccgcttaagcggtggttagggtttgtctgacgcggggggagggggaaggaacgaaacactctcattcggaggcagctcggggtttggtcttggtggccacgggcacgcagaagagcgccgcgatcctcttaagcacccccccgccctccgtggaggcgggggtttggtcggcgggtggtacctggcgggccgctggctcgggcgggtcgcgcgccccagagtgtgaccttttcggtctgctcgcagacccccgggcagcgccgccgcggcggcgacgggctcgctgggtcctaggctccatggggaccgtatacgtggacaggctctggagcatccgcacgactgcggtgatattaccggagaccttctgcgggacgagccgggtcacgcggctgacgcggagcgtccgttgggcgacaaacaccaggacggggcacaggtacactatcttgtcacccggaggcgcgagggactgcaggagcttcagggagtggcgcagctgcttcatccccgtggcccgttgctcgcgtttgctggcggtgtccccggaagaaatatatttgcatgtctttagttctatgatgacacaaaccccgcccagcgtcttgtcattggcgaattcgaacacgcagatgcagtcggggcggcgcggtcccaggtccacttcgcatattaaggtgacgcgtgtggcctcgaacaccgagcgaccctgcagcgacccgcttaaaccggtccgccttttttgcacgggtaagcaccttgggtgggcggaggaggggggacgcgggggcggaggaggggggacgcgggggcggaggaggggggacgcgggggcggaggaggggggacgcgggggcggaggaggggggacgcggggggcggaggaggggggacgcagggggcggaggagggggctcacccgcgttcgtgccttcccgcaggaggaacgccctcgtcgaggcgaccggcggcgaccgttgcgtggaccgcttcctgctcgtcggggggggagccactgtggtcctccgggacgttttctggatggccgacatttccccaggcgcttttgtgccttgtgtaaaagcgcggcgtcccgctctccgatccccgcccctgggcacgcgcaagcgcaagcgccctgcccgccccctctcatcggagtctgaggtcgaatccgagacagccttggagtctgaggtcgaatccgagacagcatcggattcgaccgagtctggggaccaggaggaagccccccgcatcggtggccgtagggccccccggaggcttggggggcggttttttctggacatgtcggcggaatccaccacggggacggaaacggatgcgtcggtgtcggacgaccccgacgacacgtccgactggtcttgtgacgacattcccccacgacccaagcgggcccgggtaaacctgcggctcactagctctcccgatcggcgggatggggttatttttcctaagatggggcgggtccggtctacccgggaaacgcagccccgggcccccaccccgtcggccccaagcccaaatgcaatgctccggcgctcggtgcgccaggcccagaggcggagcagcgcacgatggacccccgacctgggctacatgcgccagtgtatcaatcagctgtttcgggtcctgcgggtcgcccgggacccccacggcagtgccaaccgcctgcgccacctgatacgcgactgttacctgatgggatactgccgagcccgtctggccccgcgcacgtggtgccgcttgctgcaggtgtccggcggaacctggggcatgcacctgcgcaacaccatacgggaggtggaggctcgattcgacgccaccgcagaacccgtgtgcaagcttccttgtttggaggccagacggtacggcccggagtgtgatcttagtaatctcgagattcatctcagcgcgacaagcgatgatgaaatctccgatgccaccgatctggaggccgccggttcggaccacacgctcgcgtcccagtccgacacggaggatgccccctcccccgttacgctggaaaccccagaaccccgcgggtccctcgctgtgcgtctggaggatgagtttggggagtttgactggaccccccaggagggctcccagccctggctgtctgcggtcgtggccgataccagctccgtggaacgcccgggcccatccgattctggggcgggtcgcgcagcagaagaccgcaagtgtctggacggctgccggaaaatgcgcttctccaccgcctgcccctatccgtgcagcgacacgtttctccggccgtgagtccggtcgccccgacccccttgtatgtccccaaaataaaagaccaaaatcaaagcgtttgtcccagcgtcttaatggcgggaagggcggagagaaacagaccacgcgtacatggggggtgtttgggggtttattgacatcggggctacagggtggtaaccggatagcagatgtgaggaagtctgggccgttcgccgcgaacggcgatcagagggtccgtttcttgcggaccacggcccggtgatgtgggttgctcgtctaaaatctcgggcatacccatacacgcacaacacggacgccgcaccgaatgggacgtcgtaagggggtgggaggtagctgggtggggtttgtgcagagcaatcagggaccgcagccagcgcatacaatcgcgctcccgtccgttggtcccgggcaggaccacgccgtactggtattcgtaccggctgagcagggtctccagggggtggttgggtgccgcggggaacggggtccacgccacggtccactcgggcaaaaaccgagtcggcacggcccacggttctcccacccacgcgtctggggtcttgatggcgataaatcttaccccgagccggattttttgggcgtattcgagaaacggcacacacagatccgccgcgcctaccacccacaagtggtagaggcgaggggggctgggttggtctcggtgcaacagtcggaagcacgccacggcgtccacgacctcggtgctctccaaggggctgtcctccgcaaacaggcccgtggtggtgtttggggggcagcgacaggacctagtgcgcacgatcgggcgggtgggtttgggtaagtccatcagcggctcggccaaccgtcgaaggttggccgggcgaacgacgaccggggtacccaggggttctgatgccaaaatgcggcactgcctaagcaggaagctccacagggccgggcttgcgtcgacggaagtccggggcagggcgttgttctggtcaaggagggtcattacgttgacgacaacaacgcccatgttggtatattacaggcccgtgtccggtttggggcacttgcagatttgtaaggccacgcacggcggggagacaggccgacgcgggggctgctctaaaaatttaagggccctacggtccacagacccgccttcccgggggggcccttggagcgaccggcagcggaggcgtccgggggaggggagggttatttacgggggggtaggtcagggggtgggtcgtcaaactgccgctccttaaaaccccggggcccgtcgttcggggtgctcgttggttggcactcacggtgcggcgaatggcctgtcgtaagttttgtcgcgtttacgggggacagggcaggaggaaggaggaggccgtcccgccggagacaaagccgtcccgggtgtttcctcatggccccttttataccccagccgaggacgcgtgcctggactccccgcccccggagacccccaaaccttcccacaccacaccacccggcgatgccgagcgcctgtgtcatctgcaggagatcctggcccagatgtacggaaaccaggactaccccatagaggacgaccccagcgcggatgccgcggacgatgtcgacgaggacgccccggacgacgtggcctatccggaggaatacgcagaggagctttttctgcccggggacgcgaccggtccccttatcggggccaacgaccacatccctcccccgcgtggcgcatctccccccggtatacgacgacgcagccgggatgagattggggccacgggatttaccgcagaagagctggacgccatggacaggcaggcggctcgagccatcagccgcggcggcaagcccccctcgaccatggccaagctggtgactggcatgggctttacgatccacggagcgctcaccccaggatcggaggggtgtgtctttgacagcagccacccagattacccccaacgggtaatcgtgaaggcggggtggtacacgagcacgagccacgaggcgcgactgctgaggcgactggaccacccggcgatcctgcccctcctggacctgcatgtcgtctccggggtcacgtgtctggtcctccccaagtaccaggccgacctgtatacctatctgagtaggcgcctgaacccactgggacgcccgcagatcgcagcggtctcccggcagctcctaagcgccgttgactacattcaccgccagggcattatccaccgcgacattaagaccgaaaatatttttattaacacccccgaggacatttgcctgggggactttggtgccgcgtgcttcgtgcagggttcccgatcaagccccttcccctacggaatcgccggaaccatcgacaccaacgcccccgaggtcctggccggggatccgtataccacgaccgtcgacatttggagcgccggtctggtgatcttcgagactgccgtccacaacgcgtccttgttctcggccccccgcggccccaaaaggggcccgtgcgacagtcagatcacccgcatcatccgacaggcccaggtccacgttgacgagttttccccgcatccagaatcgcgcctcacctcgcgctaccgctcccgcgcggccgggaacaatcgcccgccttacacccgaccggcctggacccgctactacaagatggacatagacgtcgaatatctggtttgcaaagccctcaccttcgacggcgcgcttcgccccagcgccgcagagctgctttgtttgccgctgtttcaacagaaatgaccgcccccggggggcggtgctgtttgcgggttggcacaaaaagaccccgacccgcgtctgtggtgtttttggcatcatgtcgccgggcgccatgcgtgccgttgttcccattatcccattccttttggttcttgtcggtgtatcgggggttcccaccaacgtctcctccaccacccaaccccaactccagaccaccggtcgtccctcgcatgaagcccccaacatgacccagaccggcaccaccgactctcccaccgccatcagccttaccacgcccgaccacacaccccccatgccaagtatcggactggaggaggaggaggaagaggaggagggggccggggatggcgaacatcttaaggggggagatgggacccgtgacaccctaccccagtccccgggtccagccgtcccgttggccggggatgacgagaaggacaaacccaaccgtcccgtagtcccaccccccggtcccaacaactcccccgcgcgccccgagaccagtcgaccgaagacaccccccaccagtatcgggccgctggcaactcgacccacgacccaactcccctcaaaggggcgacccttggttccgacgcctcaacataccccgctgttctcgttcctcactgcctcccccgccctggacaccctcttcgtcgtcagcaccgtcatccacaccttatcgtttgtgtgtattgttgctatggcgacacacctgtgtggtggttggtccagacgcgggcgacgcacacaccctagcgtgcgttacgtgtgcctgccgcccgaacgcgggtagggtatggggcggggatggggagagcccacacgcggaaagcaagaacaataaaggcggcgggatctagttgatatgcgtctctgggtgtttttggggtgtggtgggcgcggggcggtcattggacgggggtgcagttaaatacatgcccgggacccatgaagcatgcgcgacttccgggcctcggaacccacccgaaacggccaacggacgtctgagccaggcctggctatccggagaaacagcacacgacttggcgttctgtgtgtcgcgatgtctctgcgcgcagtctggcatctggggcttttgggaagcctcgtgggggctgttcttgccgccacccatctgggacctgcggccaacacaacggaccccttaacgcacgccccagtgtcccctcaccccagccccctggggggctttgccgtccccctcgtagtcggtgggctgtgtgccgtagtcctgggggcggcgtgtctgcttgagctcctgcgtcgtacgtgccgcgggtgggggcgttaccatccctacatggacccagttgtcgtataattttttcccccccccccttctccgcatgggtgatgtcgggtccaaactcccgacaccaccagctggcatggtataaatcaccggtgcgccccccaaaccatgtccggcagggggatggggggcgaatgcggagggcacccaacaacaccgggctaaccaggaaatccgtggccccggcccccaacaaagatcgcggtagcccggccgtgtgacattatcgtccataccgaccacaccgacgaatcccctaagggggaggggccattttacgaggaggaggggtataacaaagtctgtctttaaaaagcaggggttagggagttgttcggtcataagcttcagtgcgaacgaccaactaccccgatcatcagttatccttaaggtctcttttgtgtggtgcgttccggtatggggggggctgccgccaggttgggggccgtgattttgtttgtcgtcatagtgggcctccatggggtccgcggcaaatatgccttggcggatgcctctctcaagatggccgaccccaatcgctttcgcggcaaagaccttccggtcctggaccagctgaccgaccctccgggggtccggcgcgtgtaccacatccaggcgggcctaccggacccgttccagccccccagcctcccgatcacggtttactacgccgtgttggagcgcgcctgccgcagcgtgctcctaaacgcaccgtcggaggccccccagattgtccgcggggcctccgaagacgtccggaaacaaccctacaacctgaccatcgcttggtttcggatgggaggcaactgtgctatccccatcacggtcatggagtacaccgaatgctcctacaacaagtctctgggggcctgtcccatccgaacgcagccccgctggaactactatgacagcttcagcgccgtcagcgaggataacctggggttcctgatgcacgcccccgcgtttgagaccgccggcacgtacctgcggctcgtgaagataaacgactggacggagattacacagtttatcctggagcaccgagccaagggctcctgtaagtacgccctcccgctgcgcatccccccgtcagcctgcctctccccccaggcctaccagcagggggtgacggtggacagcatcgggatgctgccccgcttcatccccgagaaccagcgcaccgtcgccgtatacagcttgaagatcgccgggtggcacgggcccaaggccccatacacgagcaccctgctgcccccggagctgtccgagacccccaacgccacgcagccagaactcgccccggaagaccccgaggattcggccctcttggaggaccccgtggggacggtggcgccgcaaatcccaccaaactggcacatcccgtcgatccaggacgccgcgacgccttaccatcccccggccaccccgaacaacatgggcctgatcgccggcgcggtgggcggcagtctcctggcagccctggtcatttgcggaattgtgtactggatgcaccgccgcactcggaaagccccaaagcgcatacgcctcccccacatccgggaagacgaccagccgtcctcgcaccagcccttgttttactagatacccccccttaatgggtgcgggggggtcaggtctgcggggttgggatgggaccttaactccatataaagcgagtctggaaggggggaaaggcggacagtcgataagtcggtagcgggggacgcgcacctgttccgcctgtcgcacccacagctttttcgcgaaccgtcccgtttcgggatgccgtgccgcccgttgcagggcctggtgctcgtgggcctctgggtctgtgccaccagcctggttgtccgtggccccacggtcagtctggtatcaaactcatttgtggacgccggggccttggggcccgacggcgtagtggaggaagacctgcttattctcggggagcttcgctttgtgggggaccaggtcccccacaccacctactacgatggggtcgtagagctgtggcactaccccatgggacacaaatgcccacgggtcgtgcatgtcgtcacggtgaccgcgtgcccacgtcgccccgccgtggcatttgccctgtgtcgcgcgaccgacagcactcacagccccgcatatcccaccctggagctgaatctggcccaacagccgcttttgcgggtccggagggcgacgcgtgactatgccggggtgtacgtgttacgcgtatgggtcggggacgcaccaaacgccagcctgtttgtcctggggatggccatagccgccgaaggtactctggcgtacaacggctcggcccatggctcctgcgacccgaaactgcttccgtcttcggccccgcgtctggccccggcgagcgtataccaacccgcccctaacccggcctccaccccctcgaccaccacctccaccccctcgaccaccatccccgctccccaagcatcgaccacacccttccccacgggagacccaaaaccccaacctcacggggtcaaccacgaacccccatcgaatgccacgcgagcgacccgcgactcgcgatatgcgctaacggtgacccagataatccagatagccatccccgcgtccattatagccctggtgtttctggggagctgtatttgctttatacacagatgtcaacgccgctaccgacgctcccgccgcccgatttacagcccccagatacccacgggcatctcatgcgcggtgaacgaagcggccatggcccgcctcggagccgagctcaaatcgcatccgagcaccccccccaaatcccggcgccggtcgtcacgcacgccaatgccctccctgacggccatcgccgaagagtcggagcccgcgggggcggctgggcttccgacgccccccgtggaccccacgacatccaccccaacgcctcccctgttggtataggtccacggccactggccgggggcaccacataaccgaccgcagtcactgagttgggaataaaccggtattatttacctatatccgtgtatgtccatttctttcttcccccccccccccggaaaccaaagaaggaagcaaagaatggatgggaggagttcaggaagccggggagagggcccgcggcgcatttaaggcgttgttgtgttgactttggctcttctggcgggttggtgcggtgctgtttgttgggctcccattttacccgaagatcggctgctatccccgggacatggatcgcggggcggtggtggggtttcttctcggtgtttgtgttgtatcgtgcttggcgggaacgcccaaaacgtcctggagacgggtgagtgtcggcgaggacgtttcgttgcttccagctccggggcctacggggcgcggcccgacccagaaactactatgggccgtggaacccctggatgggtgcggccccttacacccgtcgtgggtctcgctgatgccccccaagcaggtgcccgagacggtcgtggatgcggcgtgcatgcgcgctccggtcccgctggcgatggcgtacgcccccccggccccatctgcgaccgggggtctacgaacggacttcgtgtggcaggagcgcgcggccgtggttaaccggagtctggttattcacggggtccgagagacggacagcggcctgtataccctgtccgtgggcgacataaaggacccggctcgccaagtggcctcggtggtcctggtggtgcaaccggccccagttccgaccccacccccgaccccagccgattacgacgaggatgacaatgacgagggcgaggacgaaagtctcgccggcactcccgccagcgggaccccccggctcccgcctccccccgcccccccgaggtcttggcccagcgcccccgaagtctcacatgtgcgtggggtgaccgtgcgtatggagactccggaagctatcctgttttcccccggggagacgttcagcacgaacgtctccatccatgccatcgcccacgacgaccagacctactccatggacgtcgtctggttgaggttcgacgtgccgacctcgtgtgccgagatgcgaatatacgaatcgtgtctgtatcacccgcagctcccagaatgtctgtccccggccgacgcgccgtgcgccgcgagtacgtggacgtctcgcctggccgtccgcagctacgcggggtgttccagaacaaaccccccaccgcgctgttcggccgaggctcacatggagcccgtcccggggctggcgtggcaggcggcctccgtcaatctggagttccgggacgcgtccccacaacactccggcctgtatctgtgtgtggtgtacgtcaacgaccatattcacgcctggggccacattaccatcagcaccgcggcgcagtaccggaacgcggtggtggaacagcccctcccacagcgcggcgcggatttggccgagcccacccacccgcacgtcggggcccctccccacgcgcccccaacccacggcgccctgcggttaggggcggtgatgggggccgccctgctgctgtctgcgctggggttgtcggtgtgggcgtgtatgacctgttggcgcaggcgtgcctggcgggcggttaaaagcagggcctcgggtaaggggcccacgtacattcgcgtggccgacagcgagctgtacgcggactggagctcggacagcgagggagaacgcgaccaggtcccgtggctggcccccccggagagacccgactctccctccaccaatggatccggctttgagatcttatcaccaacggctccgtctgtatacccccgtagcgacgggcatcaatctcgccgccagctcacaacctttggatccggaaggcccgatcgccgttactcccaggcctccgattcgtccgtcttctggtaaggcgccccatcccgaggccccacgtcggtcgccgaactgggcgaccgccggcgaggtggacgtcggagacgagctaatcgcgatttccgacgaacgcggacccccccgacatgaccgcccgcccctcgccacgtcgaccgcgccctcgccacacccgcgacccccgggctacacggccgttgtctccccgatggccctccaggctgtcgacgccccctccctgtttgtcgcctggctggccgctcggtggctccggggggcttccggcctgggggccgtcctgtgtgggattgcgtggtatgtgacgtcaattgcccgaggcgcacaaagggccggtggtccgcctagccgcagcaaattaaaaatcgtgagtcacagcgaccgcaacttcccacccggagctttcttccggcctcgatgacgtcccggctctccgatcccaactcctcagcgcgatccgacatgtccgtgccgctttatcccacggcctcgccagtttcggtcgaagcctactactcggaaagcgaagacgaggcggccaacgacttcctcgtacgcatgggccgccaacagtcggtattaaggcgttgacgcagacgcacccgctgcgtcggcatggtgatcgcctgtctcctcgtggccgttctgtcgggcggatttggggcgctcctgatgtggctgctccgctaaaagaccgcatcgacacgcgcgtccttcttgtcgtctctcttcccccccatcaccccgcaatttgcacccagcctttaactacattaaattgggttcgattggcaatgttgtctcccggttgatttttgggtgggtggggagtgggtgggtggggagtgggtgggtggggagtgggtgggtggggagtgggtgggtggggagtgggtgggtggggagtgggtgggtggggagtgggtgggtggggagtgggtgggtggggagtgggtgggtggggagtggcaaggaagaaacaagcccgaccaccagacagaaaatgtaaccatacccaaaccgactctgggggctgtttgtggggtcggaaccataggatgaacaaaccaccccgtacctcccgcacccaagggtgcgggtggctcatcggcatctgtccggtatgggttgttccccacccactcgcgttcggacgtcttagaatcatggcggttttctatgccgacatcggttttctcccccgcaataagacacgatgcgataaaatctgtttgtaaaatttattaagggtacaaattgccctagcacaggggtggggttagggccgggtccccacacccaaacgcaccaaacagatgcaggcagtgggtcgagtacagccccgcgtacgaacacgtcgatgcgtgtgtcagacagcaccagaaagcacaggccatcaacaggtcgtgcatgtgtcggtgggtttggacgcggggggccatggtggtgataaagttaatggccgccgtccgccagggccacaggggcgacgtctcttggttggcccggagccactgggtgtggaccagccgcgcgtggcggcccaacatggcccctgtagccgggggcgggggatcgcgcacgtttgcagcgcacatgcgagacacctcgaccacggttcgaaagaaggcccggtggtccgcgggcaacatcaccaggtgcgcaagcgcccgggcgtccagagggtagagccctgagtcatccgaggttggctcatcgcccgggtcttgccgcaagtgcgtgtgggttgggcttccggtgggcgggacgcgaaccgcggtgtggatcccgacgcgggcccgagcgtatgctccatcttgtggggagaaggggtctgggctcgccaggggggcatacttgcccgggctatacagacccgcgagccgtacgtggttcgcggggggtgcgtggggtccggggctccctgggagaccggggttgtcgtggatccctggggtcacgcggtaccctggggtctctgggagctcgcggtactctgggttccctaggttctcggggtggtcgcggaacccggggctcccggggaacacgcggtgtcctggggattgttggcggtcggacggcttcagatggcttcgagatcgtagtgtccgcaccgactcgtagtagacccgaatctccacattgccccgccgcttgatcattatcaccccgttgcgggggtccggagatcatgcgcgggtgtcctcgaggtgcgtgaacacctctggggtgcatgccggcggacggcacgccttttaagtaaacatctgggtcgcccggcccaactggggccgggggttgggtctggctcatctcgagagacacgggggggaaccaccctccgcccagagactcgggtgatggtcgtacccgggacctacttgtcgtcatcgtctttgtagtcgaccgagttcgccgggccggctccgcgggccagggcccgggcacgggcctcgggccccaggcacggcccgatgaccgcctcggcctccgccacccggcgccggaaccgagcccggtcggcccgctcgcgggcccacgagccgcggcgcgccaggcgggcggccgaggcccagaccaccaggtggcgcacccggacgtggggcgagaagcgcacccgcgtgggggtcgcgggggtcgcgggggtcgcggggggcttcggcgccccctccccgcccgcgcgtcgcaggcgcaggcgcgccaggtgctctgcggtgacgcgcaggcggagggcgaggcgcggcggaaggcggaaggggcgtgagggggggtgggaggggttagccccgccccccgggcccgcgccgggcggtggggaccgggggcggggggcggcggcggtgggccgggcctctggcgccggctcgggcggggggctgtccggccagtcgtcgtcgtcgtcgtcggacgcggactcgggaacgtggagccactggcgcagcagcagcgaacaagaaggcgggggcccactggcggggggcggcggcggggcggccgcgggcgcgctcctgaccacgggttccgagttgggcgtggaggttacctgggactgtgcggttgggaccgcgcccgtgggcccgggcggccgggggcggcgggggccgcgatggcggcggcgggccatgtttaaacagctctgcttatatagacctcccaccgtacacgcctaccgcccatttgcgtcaatggggcggagttgttacgacattttggaaagtcccgttgattttggtgccaaaacaaactcccattgacgtcaatggggtggagacttggaaatccccgtgagtcaaaccgctatccacgcccattgatgtactgccaaaaccgcatcaccatggtaatagcgatgactaatacgtagatgtactgccaagtaggaaagtcccataaggtcatgtactgggcataatgccaggcgggccatttaccgtcattgacgtcaatagggggcgtacttggcatatgatacacttgatgtactgccaagtgggcagtttaccgtaaatactccacccattgacgtcaatggaaagtccctattggcgttactatgggaacatacgtcattattgacgtcaatgggcgggggtcgttgggcggtcagccaggcgggccatttaccgtaagttatgtaacgacaacttcgtatagaaaggtatatacgaagttgt

SEQ ID NO: 17 - DNA, 23110 bp, synthetic construct
  source 1..23110: mol_type = other DNA
cattcttaaggaacttgaaaagccagcaccctgatgcgacctcgttttagtctacgtttatctgtctttacttaatgtcctttgttacaggccagaaagcataactggcctgaatattctctctgggcccactgttccacttgtatcgtcggtctgataatcagactgggaccacggtcccactcgtatcgtcggtctgattattagtctgggaccacggtcccactcgtatcgtcggtctgattattagtctgggaccacggtcccactcgtatcgtcggtctgataatcagactgggaccacggtcccactcgtatcgtcggtctgattattagtctgggaccatggtcccactcgtatcgtcggtctgattattagtctgggaccacggtcccactcgtatcgtcggtctgattattagtctggaaccacggtcccactcgtatcgtcggtctgattattagtctgggaccacggtcccactcgtatcgtcggtctgattattagtctgggaccacgatcccactcgtgttgtcggtctgattatcggtctgggaccacggtcccacttgtattgtcgatcagactatcagcgtgagactacgattccatcaatgcctgtcaagggcaagtattgacatgtcgtcgtaacctgtagaacggagtaacctcggtgtgcggttgtatgcctgcggtggattgctgctgtgtcctgcttatccacaacattttgcgcacggttatgtggacgggcctatacatgtgtatatatgtatacctatgaatgtcagtaagtatgtatacgaacagtatgatactgaagatgacaaggtaatgcatcattctatacgtgtcattctgaacgaggcgcgctttccttttttctttttgctttttctttttttttctcttgaactcgacggatctatgcggtgtgaaataccgcacagatgcgtataacttcgtatagcatacattatacgaagttattaatggcaaaactcacatccgctgtaccagtattgactgcaagagatgtggcaggtgcagtggaattttggacagatagactgggcttttcacgtgattttgtcgaagatgattttgcgggagtcgtgagggatgatgtcacacttttcatttctgctgtacaagatcaagttgttcccgataatacacttgcgtgggtttgggtcagaggactcgatgaactttatgcagaatggagcgaagtggtctcaacaaattttcgtgatgcgtctggtccagcaatgacagaaattggtgaacaaccctggggtagggaatttgcgctcagggatccagcggggaattgtgttcattttgtcgcagaagaacaagatggctcaggcgccaccaactttagcctgctgaagcaggcaggcgacgtcgaggagaaccccggccctatggtgagcaagggcgaggagctgttcaccggggtggtgcccatcctggtcgagctggacggcgacgtaaacggccacaagttcagcgtgtccggcgagggcgagggcgatgccacctacggcaagctgaccctgaagttcatctgcaccaccggcaagctgcccgtgccctggcccaccctcgtgaccaccttcggctacggcctgaagtgcttcgcccgctaccccgaccacatgaagcagcacgacttcttcaagtccgccatgcccgaaggctacgtccaggagcgcaccatcttcttcaaggacgacggcaactacaagacccgcgccgaggtgaagttcgagggcgacaccctggtgaaccgcatcgagctgaagggcatcgacttcaaggaggacggcaacatcctggggcacaagctggagtacaactacaacagccacaacgtctatatcatggccgacaagcagaagaacggcatcaaggtgaacttcaagatccgccacaacatcgaggacggcagcgtgcagctcgccgaccactaccagcagaacacccccatcggcgacggccccgtgctgctgcccgacaaccactacctgagctaccagtccgccctgagcaaagaccccaacgagaagcgcgatcacatggtcctgctggagttcgtgaccgccgccgggatcactctcggcatggacgagctgtacaagtgaagttcctatactctagaaagaataggaacttctaagatcataatcagccataccacatttgtagaggttttacttgctttaaaaaacctcccacacctccccctgaacctgaaacataaaatgaatgcaattgttgttgttaacttgtttattgcagcttataatggttacaaataaagcaatagcatcacaaatttcacaaataaagcatttttttcactgcattctagttgtggtttgtccaaactcatcaatgtatcttatcatgtctggagagaccataacttcgtataggatactttatacgaagttataacctggtctcagctaggaaaccagtacaaaggcaacatcctcacttgggtgaacggaaacgcagtattatggttactttttggatacgtgaaacatatcccatggtagtccttagacttgggagtctatcacccctagggcccatatctggaaatagacgccaggttgaatccgtatttggaggtacgatggaacagtctgggtgggacgtgcttcttaattaagggctagggggcttgcggaaacagaagacgtgtgggataaaagaatcgcactaccccaaggaagggcggggcggtttattacagagccagtcccttgagcggggatgcgtcatagacgagatactgcgcgaagtgggtctcccgcgcgtgggcttccccgttgcgggcgctgcggaggagggcggggtcgctggcgcaggtgagcgggtaggcctcctgaaacaggccacacgggtcctccacgagttcgcggcaccccggggggcgcttaaactgtacgtcgctggcggcggtggccgtggacaccgccgaacccgtctccacgatcaggcgctccaggcagcgatgtttggcggcgatgtcggccgacgtaaagaacttaaagcaggggctgagcaccggcgaggccccgttgaggtggtaggccccgttatagagcaggtccccgtacgaaaatcgctgcgacgcccacgggttggccgtggccgcgaaggcccgggacgggtcgctctggccgtggtcgtacatgagggcggtgacatccccctccttgtcccccgcgtaaacgcccccggcggcgcgtccccgggggttgcagggccggcggaagtagttgacgtcggtcgacacgggggtggcgataaactcacacacggcgtcctggccgtggtccatccctgcgcgccgcggcacctgggcgcacccgaacacggggacgggctgggccggccccaggcggtttcccgccacgaccgcgttccgcaggtacacggctgccgcgttgtccagtagagggggagccccgcggcccaggtaaaagttttggggaaggttgcccatgtcggtgacggggttgcggacggttgccgtggccacgacggcggtgtagcccacgcccaggtccacgttcccgcgcggctgggtgagcgtgaagtttacccccccgccagtttcatgccgggccacctggagctggcccaggaagtacgcctccgacgcgcgctccgagaacagcacgttctcagtcacaaagcggtcctgtcggacgacggtgaacccaaacccgggatggaggcccgtcttgagctgatgatgcaaggccacgggactgatcttgaagtaccccgccatgagcgcgtaggtcagcgcgttctccccggccgcgctctcgcggacgtgctgcacgacgggctgtcggatcgacgaaaagtagttggcccccagagccggggggaccagggggacctgccgcgacaggtcgcgcagggccggggggaaattgggcgcgttcgccacgtggtcggccccggcgaacagcgcgtggacggggagggggtaaaaatagtcgccattttggatggtatggtccagatgctggggggccatcagcaggattccggcgtgcaacgccccgtcgaatatgcgcatgttggtggtggacgcggtgttggcgcccgcgtcgggcgccgccgagcagagcagcgccgttgtgcgttcggccatgttgtgggccagcacctgcagcgtgagcatggcgggcccgtccactaccacgcgcccgttgtgaaacatggcgttgaccgtgttggccaccagattggccgggtgcagggggtgcgcggggtccgtcacggggtcgctggggcaatcctcgccgggggtgatctccgggaccaccatgttctgcagggtggcgtatacgcggtcgaagcgaacccccgcggtgcagcagcggccccgcgagaaggcgggcaccatcacgtagtagtaaatcttgtggtgcacggtccagtccgccccccggtgcggccggtcgtccgcggcgtccgcggctcgggcctgggtgttgtgcagcagctggccgtcgttgcggttgaagtccgcggtcgccacgttacacgccgctgcgtacacggggtcgtggccccccgcgctaacccggcagtcgcgatggcggtccagggccgcgcgccgcatcagggcgtcgcagtcccacacgaggggtggcagcagcgccgggtctcgcattaggtgattcagttcggcttgcgcctgcccgcccagttccgggccggtcagggtaaagtcatcaaccagctgggccagggcctcgacgtgcgccaccaggtcccggtacacggccatgcactcctcgggaaggtctcccccgaggtaggtcacgacgtacgagaccagcgagtagtcgttcacgaacgccgcgcaccgcgtgttgttccagtagctggtgatgcactggaccacgagccgggccagggcgcagaagacgtgctcgctgccgtgtatggcggcctgcagcaggtaaaacaccgccgggtagttgcggtcttcgaacgccccgcgaacggcggcgatggtggcgggggccatggcgtggcgtcccacccccagctccaggccccgggcgtcccggaacgccgccggacatagcgccaggggcaagttgccgttcaccacgcgccaggtggcctggatctcccccgggccggccgggggaacgtccccccccggcagctccacgtcggccacccccacgaagaagtcgaacgcggggtgcagctcaagagccaggttggcgttgtcgggctgcataaactgctccggggtcatctggccttccgcgacccatcggacccgcccgtgggccaggcgctgcccccaggcgttcaaaaacagctgctgcatgtctgcggcggggccggccggggccgccacgtacgccccgtacggattggcggcttcgacggggtcgcggttaaggcccccgaccgccgcgtcaacgttcatcagcgaagggtggcacacggtcccgatcgcgtgttccagagacaggcgcagcacctggcggtccttcccccaaaaaaacagctggcggggcgggaaggcgcggggatccgggtggccgggggcggggactaggtccccggcgtgcgcggcaaaccgttccatgaccggattgaacaggcccaggggcaggacgaacgtcaggtccatggcgcccaccagggggtagggaacgttggtggcggcgtagatgcgcttctccagggcctccaaaaagatcagcttctcgccgatggacaccagatccgcgcgcacgcgcgtcgtctggggggcgctctcgagctcgtccagcgtctgccggttcaggtcgagctgctcctcctgcatctccagcaggtggcggcccacgtcgtccagacttcgcacggccttgcccatcacgagcgccgtgaccaggttggccccgttcaggaccatctcgccgtacgtcaccggcacgtcggcttcggtgtcctccactttcaggaaggactgcaggaggcgctgtttgatcggggcggtggtgacgagcaccccgtcgaccggacgcccgcgcgtgtcggcatgcgtcagacggggcacggccacggagggctgcgtggccgtggtgaggtccacgagccaggcctcgacggcctcccggcggtggcccgccttgcccaggaaaaagctcgtctcgcagaagcttcgctttagctcggcgaccagggtcgcccgggccaccctggtggccaggcggccgttgtccaggtatcgttgcatcggcaacaacaaagccaggggcggcgccttttccagcagcacgtgcagcatctggtcggccgtgccgcgctcaaacgccccgaggacggcctggacgttgcgagcgagctgttggatggcgcgcaactggcgatgcgcgctgatacccgtcccgtccagggcctcccccgtgagcagggcgatggcctcggtggccaggctgaaggcggcgttcagggcccggcggtcgataatcttggtcatgtaattgtgtgtgggttgctcgatggggtgcgggccgtcgcgggcaatcagcggctggtggacctcgaactgtacgcgcccctcgttcatgtaggccagctccggaaacttggtacacacgcacgccaccgacaacccgagctccagaaagcgcacgagcgacagggtgttgcaatacgaccccaacagggcgtcgaactcgacgtcatacaggctgtttgcatcggagcgcacgcgggaaaaaaaatcgaacaggcgtcgatgcgacgccacctcgatcgtgctaaggagggacccggtcggcaccatggccgcggcataccggtatcccggagggtcgcggttgggagcggccatggggtcgcgtggagatcggctgtctctagcgatattggcccggggaggctaagatccaccccaacgcccggccacccgtgtacgtgcccgacggcccaaggtccaccgaaagacacgacgggcccggacccaaaaaggcgggggatgctgtgtgagaggccgggtgtcggtcgggggggaaaggcaccgggagaaggctgcggcctcgttccaggagaacccagtgtccccaacagacccggggacgtgggatcccaggccttatataccccccccgccccacccccgttagaacgcgacgggtgcattcaagatggccctggtccaaaagcgtgccaggaagaaattggcagaggcggcaaagctgtccgccgccgccacccacatcgaggccccggccgcgcaggctatccccagggcccgtgtgcgcaggggatcggtgggcggcagcatttggttggtggcgataaagtggaaaagcccgtccggactgaaggtctcgtgggcggcggcgaacaaggcacacagggccgtgcctcccaaaaacacggacatcccccaaaacacgggcgccgacaacggcagacgatccctcttgatgttaacgtacaggaggagcgcccgcaccgcccacgtaacgtagtagccgacgatggcggccaggatacaggccggcgccaccacccttccggtcagcccgtaatacatgcccgctgccaccatctccaacggcttcaggaccaaaaacgaccaaaggaacagaatcacgcgctttgaaaagaccggctgggtatggggcggaagacgcgagtatgccgaactgacaaaaaagtcagaggtgccgtacgaggacaatgaaaactgttcctccagtggcagttctccctcctcccccccaaaggcggcctcgtcgaccagatctcgatccaccagaggaaggtcatcccgcatggtcatggggtgtgcggtggaggtggggagaccgaaaccgcaaagggtcgcttacgtcagcaggatcccgagatcaaagacacccgggttcttgcacaaacaccacccgggttgcatccgcggaggcgagtgttttgataaggccgttccgcgccttgatataacctttgatgttgaccacaaaacccggaatttacgcctacgccccaatgcccacgcaagatgaggtaggtaaccccccccccgtgggtgtgacgttgcgtttagttcattggaggccaaggggaaaatggggtggggaggaaacggaaaacccagtaggccgtgttgggaacacgcccggggttgtcctcaaaaggcagggtccatactacggaagccgtcgttgtattcgagacctgcctgtgcgacgcacgtcggggttgcctgtgtccggttcggccccaccgcgtgcggcacgcacgaggacgagtccgcgtgctttattggcgttccaagcgttgccctccagtttctgttgtcggtgttcccccatacccacgcccacatccaccgtagggggcctctgggccgtgtcacgtcgccgcccgcgatggagcttagctacgccaccaccatgcactaccgggacgttgtgttttacgtcacaacggaccgaaaccgggcctactttgtgtgcggggggtgtgtttattccgtggggcggccgtgtgcctcgcagcccggggagattgccaagtttggtctggtcgttcgagggacaggcccagacgaccgcgtggtcgccaactatgtacgaagcgagctccgacaacgcggcctgcaggacgtgcgtcccattggggaggacgaggtgtttctggacagcgtgtgtcttctaaacccgaacgtgagctccgagctggatgtgattaacacgaacgacgtggaagtgctggacgaatgtctggccgagtactgcacctcgctgcgaaccagcccgggtgtgctaatatccgggctgcgcgtgcgggcgcaggacagaatcatcgagttgtttgaacacccaacgatagtcaacgtttcctcgcactttgtgtataccccgtccccatacgtgttcgccctggcccaggcgcacctcccccggctcccgagctcgctggaggccctggtgagcggcctgtttgacggcatccccgccccacgccagccacttgacgcccacaacccgcgcacggatgtggttatcacgggccgccgcgccccacgacccatcgccgggtcgggggcggggtcggggggcgcgggcgccaagcgggccaccgtcagcgagttcgtgcaagtcaaacacattgaccgcgtgggccccgctggcgtttcgccggcgcctccgccaaacaacaccgactcaagttccctggtgcccggggcccaggattccgccccgcccggccccacgctaagggagctgtggtgggtgttttatgccgcagaccgggcgctggaggagccccgcgccgactctggcctcacccgcgaggaggtacgtgccgtacgtgggttccgggagcaggcgtggaaactgtttggctccgcgggggccccgcgggcgtttatcggggccgcgttgggcctgagccccctccaaaagctagccgtttactactatatcatccaccgagagaggcgcctgtcccccttccccgcgctagtccggctcgtaggccggtacacacagcgccacggcctgtacgtccctcggcccgacgacccagtcttggccgatgccatcaacgggctgtttcgcgacgcgctggcggccggaaccacagccgagcagctcctcatgttcgaccttctccccccaaaggacgtgccggtgggaagcgacgtgcaggccgacagcaccgctctgctgcgctttatagaatcgcaacgtctcgccgtccccgggggggtgatctcccccgagcacgtcgcgtaccttggtgcgttcctgagcgtgctgtacgctggccgcgggcgcatgtccgcagccacgcacaccgcgcggctgacaggggtgacctccctggtgctagcggtgggtgacgtggaccgtctttccgcgtttgaccgcggagcggcgggcgcggccagccgcacgcgggccgccgggtacctggatgtgcttcttaccgttcgtctcgctcgctcccaacacggacagtctgtgtaacagaccccaataaacgtatgtcgctaccacacccttgtgtgtcaatggacgcctctccgggggggaagggaaaacaaagaggggctgggggagcggcaccaccggggcctgaacaaacaaaccacagacacggttacagtttattcggtcgggcggagaaacggccgaagccacgcccccacaacttcgtatagaaaggtatatacgaagttgtcaattctcatgtttgacagcttatcatcgaatttctgccattcatccgcttattatcacttattcaggcgtagcaaccaggcgtttaagggcaccaataactgccttaaaaaaattagaaaaactcatcgagcatcaaatgaaactgcaatttattcatatcaggattatcaataccatatttttgaaaaagccgtttctgcggcgcgcaattccacttgcaattacataaaaaattccggcggtttttcgcgtgtgactcaatgtcgaaatacctgcctaatgaacatgaacatcgcccaaatgtatttgaagacccgctgggagaagttcaagatatataagtaacaagcagccaatagtataaaaaaaaatctgagtttattacctttcctggaatttcagtgaaaaactgctaattatagagagatatcacagagttactcactaatgactaacgaaaaggtctggatagagaagttggataatccaactctttcagtgttaccacatgactttttacgcccacaacaagaaccttatacgaaacaagctacatattcgttacagctacctcagctcgatgtgcctcatgatagtttttctaacaaatacgctgtcgctttgagtgtatgggctgcattgatatatagagtaaccggtgacgatgatattgttctttatattgcgaataacaaaatcttaagattcaatattcaaccaacgtggtcatttaatgagctgtattctacaattaacaatgagttgaacaagctcaattctattgaggccaatttttcctttgacgagctagctgaaaaaattcaaagttgccaagatctggaaaggacccctcagttgttccgtttggcctttttggaaaaccaagatttcaaattagacgagttcaagcatcatttagtggactttgctttgaatttggataccagtaataatgcgcatgttttgaacttaatttataacagcttactgtattcgaatgaaagagtaaccattgttgcggaccaatttactcaatatttgactgctgcgctaagcgatccatccaattgcataactaaaatctctctgatcaccgcatcatccaaggatagtttacctgatccaactaagaacttgggctggtgcgatttcgtggggtgtattcacgacattttccaggacaatgctgaagccttcccagagagaacctgtgttgtggagactccaacactaaattccgacaagtcccgttctttcacttatcgcgacatcaaccgcacttctaacatagttgcccattatttgattaaaacaggtatcaaaagaggtgatgtagtgatgatctattcttctaggggtgtggatttgatggtatgtgtgatgggtgtcttgaaagccggcgcaaccttttcagttatcgaccctgcatatcccccagccagacaaaccatttacttaggtgttgctaaaccacgtgggttgattgttattagagctgctggacaattggatcaactagtagaagattacatcaatgatgaattggagattgtttcaagaatcaattccatcgctattcaagaaaatggtaccattgaaggtggcaaattggacaatggcgaggatgttttggctccatatgatcactacaaagacaccagaacaggtgttgtagttggaccagattccaacccaaccctatctttcacatctggttccgaaggtattcctaagggtgttcttggtagacatttttccttggcttattatttcaattggatgtccaaaaggttcaacttaacagaaaatgataaattcacaatgctgagcggtattgcacatgatccaattcaaagagatatgtttacaccattatttttaggtgcccaattgtatgtccctactcaagatgatattggtacaccgggccgtttagcggaatggatgagtaagtatggttgcacagttacccatttaacacctgccatgggtcaattacttactgcccaagctactacaccattccctaagttacatcatgcgttctttgtgggtgacattttaacaaaacgtgattgtctgaggttacaaaccttggcagaaaattgccgtattgttaatatgtacggtaccactgaaacacagcgtgcagtttcttatttcgaagttaaatcaaaaaatgacgatccaaactttttgaaaaaattgaaagatgtcatgcctgctggtaaaggtatgttgaacgttcagctactagttgttaacaggaacgatcgtactcaaatatgtggtattggcgaaataggtgagatttatgttcgtgcaggtggtttggccgaaggttatagaggattaccagaattgaataaagaaaaatttgtgaacaactggtttgttgaaaaagatcactggaattatttggataaggataatggtgaaccttggagacaattctggttaggtccaagagatagattgtacagaacgggtgatttaggtcgttatctaccaaacggtgactgtgaatgttgcggtagggctgatgatcaagttaaaattcgtgggttcagaatcgaattaggagaaatagatacgcacatttcccaacatccattggtaagagaaaacattactttagttcgcaaaaatgccgacaatgagccaacattgatcacatttatggtcccaagatttgacaagccagatgacttgtctaagttccaaagtgatgttccaaaggaggttgaaactgaccctatagttaagggcttaatcggttaccatcttttatccaaggacatcaggactttcttaaagaaaagattggctagctatgctatgccttccttgattgtggttatggataaactaccattgaatccaaatggtaaagttgataagcctaaacttcaattcccaactcccaagcaattaaatttggtagctgaaaatacagtttctgaaactgacgactctcagtttaccaatgttgagcgcgaggttagagacttatggttaagtatattacctaccaagccagcatctgtatcaccagatgattcgtttttcgatttaggtggtcattctatcttggctaccaaaatgatttttaccttaaagaaaaagctgcaagttgatttaccattgggcacaattttcaagtatccaacgataaaggcctttgccgcggaaattgacagaattaaatcatcgggtggatcatctcaaggtgaggtcgtcgaaaatgtcactgcaaattatgcggaagacgccaagaaattggttgagacgctaccaagttcgtacccctctcgagaatattttgttgaacctaatagtgccgaaggaaaaacaacaattaatgtgtttgttaccggtgtcacaggatttctgggctcctacatccttgcagatttgttaggacgttctccaaagaactacagtttcaaagtgtttgcccacgtcagggccaaggatgaagaagctgcatttgcaagattacaaaaggcaggtatcacctatggtacttggaacgaaaaatttgcctcaaatattaaagttgtattaggcgatttatctaaaagccaatttggtctttcagatgagaagtggatggatttggcaaacacagttgatataattatccataatggtgcgttagttcactgggtttatccatatgccaaattgagggatccaaatgttatttcaactatcaatgttatgagcttagccgccgtcggcaagccaaagttctttgactttgtttcctccacttctactcttgacactgaatactactttaatttgtcagataaacttgttagcgaagggaagccaggcattttagaatcagacgatttaatgaactctgcaagcgggctcactggtggatatggtcagtccaaatgggctgctgagtacatcattagacgtgcaggtgaaaggggcctacgtgggtgtattgtcagaccaggttacgtaacaggtgcctctgccaatggttcttcaaacacagatgatttcttattgagatttttgaaaggttcagtccaattaggtaagattccagatatcgaaaattccgtgaatatggttccagtagatcatgttgctcgtgttgttgttgctacgtctttgaatcctcccaaagaaaatgaattggccgttgctcaagtaacgggtcacccaagaatattattcaaagactacttgtatactttacacgattatggttacgatgtcgaaatcgaaagctattctaaatggaagaaatcattggaggcgtctgttattgacaggaatgaagaaaatgcgttgtatcctttgctacacatggtcttagacaacttacctgaaagtaccaaagctccggaactagacgataggaacgccgtggcatctttaaagaaagacaccgcatggacaggtgttgattggtctaatggaataggtgttactccagaagaggttggtatatatattgcatttttaaacaaggttggatttttacctccaccaactcataatgacaaacttccactgccaagtatagaactaactcaagcgcaaataagtctagttgcttcaggtgctggtgctcgtggaagctccgcagcagcttaaggttgagcattacgtatgatatgtccatgtacaataattaaatatgaattaggagaaagacttagcttcttttcgggtgatgtcacttaaaaactccgagaataatatataataagagaataaaatattagttattgaataagaactgtaaatcagctggcgttagtctgctaatggcagcttcatcttggtttattgtagcatgaatcatatttgcctttttttcctgtaattcaatgattcttgcttctatactatcctcaatgcaaaaccttgtgatcttcacaggtcgatactgaccaattctatgaactctatcaccactttgccattcaacactagggttccaccatgggtctaaaatgaatacttgcgaagctgcccgggcggccgcccaactacgcagccgatcaacaacagaaacgcgacggtcgagatgaggaacgcacactggagcctttatcagatggtgttgatttcaattactccggagcgtgatgcggatcaaagtaaccgcgatggaaggtgggggactcgaaatagatccgttcttagccctgcgaaacatctactgtacaccacatgcaacagccacaattctcatgtttgacagcttatcatcgaatttctgccattcatccgcttattatcacttattcaggcgtagcaaccaggcgtttaagggcaccaataactgccttaaaaaaattagaaaaactcatcgagcatcaaatgaaactgcaatttattcatatcaggattatcaataccatatttttgaaaaagccgtttctgtaatgaaggagaaaactcaccgaggcagttccataggatggcaagatcctggtatcggtctgcgattccgactcgtccaacatcaatacaacctattaatttcccctcgtcaaaaataaggttatcaagtgagaaatcaccatgagtgacgactgaatccggtgagaatggcaaaagtttatgcatttctttccagacttgttcaacaggccagccattacgctcgtcatcaaaatcactcgcatcaaccaaaccgttattcattcgtgattgcgcctgagccagacgaaatacgcgatcgctgttaaaaggacaattacaaacaggaatcgaatgcaaccggcgcaggaacactgccagcgcatcaacaatattttcacctgaatcaggatattcttctaatacctggaatgctgtttttccggggatcgcagtggtgagtaaccatgcatcatcaggagtacggataaaatgcttgatggtcggaagaggcataaattccgtcagccagtttagtctgaccatctcatctgtaacatcattggcaacgctacctttgccatgtttcagaaacaactctggcgcatcgggcttcccatacaatcgatagattgtcgcacctgattgcccgacattatcgcgagcccatttatacccatataaatcagcatccatgttggaatttaatcgcggcctcgagcaagacgtttcccgttgaatatggctcattttagcttccttagctcctgaaaatctcgataactcaaaaaatacgtccggtagtgatcttatttcattatggtgaaagttggaacctcttacgtgccgatcaacgtccctgggtccttttcatcacgtgggtgatgctgccaacttactgatttagtgtatgatggtgtttttgaggtgctccagtggcttctgtttctatcagctgtccctcctgttcagctactgacggggtggtgcgtaacggcaaaagcaccgccggacatcagcgctatctctgctctcactgccgtaaaacatggcaactgcagttcacttacaccgcttctcaacccggtacgcaccagaaaatcattgatatggccatgaatggcgttggatgccgggcaacagcccgcattatgggcgttggcctcaacacgattttacgtcacttaaaaaactcaggccgcagtcggtaacctcgcgcatacagccgggcagtgacgtcatcgtctgcgcggaaatggacgaacagtggggctatgtcggggctaaatcgcgccagcgctggctgttttacgcgtatgacagtctccggaagacggttgttgcgcacgtattcggtgaacgcactatggcgacgctggggcgtcttatgagcctgctgtcaccctttgacgtggtgatatggatgacggatggctggccgctgtatgaatcccgcctgaagggaaagctgcacgtaatcagcaagcgatatacgcagcgaattgagcggcataacctgaatctgaggcagcacctggcacggctgggacggaagtcgctgtcgttctcaaaatcggtggagctgcatgacaaagtcatcgggcattatctgaacataaaacactatcaataagttggagtcattacccatcacgtgctataaaaataattataatttaaattttttaatataaatatataaattaaaaatagaaagtaaaaaaagaaattaaagaaaaaatagtttttgttttccgaagatgtaaaagactctagggggatcgccaacaaatactaccttttatcttgctcttcctgctctcaggtattaatgccgaattgtttcatcttgtctgtgtagaagaccacacacgaaaatcctgtgattttacattttacttatcgttaatcgaatgtatatctatttaatctgcttttcttgtctaataaatatatatgtaaagtacgctttttgttgaaattttttaaacctttgtttatttttttttcttcattccgtaactcttctaccttctttatttactttctaaaatccaaatacaaaacataaaaataaataaacacagagtaaattcccaaattattccatcattaaaagatacgaggcgcgtgtaagttacaggcaagcgatcttttcgccaaaagttggcccagggcttcccggtatcaacagggacaccaggatttatttattctgcgaagtgatcttccgtcacaggtatttattcgcgataagctcatggagcggcgtaaccgtcgcacaggaaggacagagaaagcgcggatctgggaagtgacggacagaacggtcaggacctggattggggaggcggttgccgccgctgctgctgacggtgtgacgttctctgttccggtcacaccacatacgttccgccattcctatgcgatgcacatgctgtatgccggtataccgctgaaagttctgcaaagcctgatgggacataagtccatcagttcaacggaagtctacacgaaggtttttgcgctggatgtggctgcccggcaccgggtgcagtttgcgatgccggagtctgatgcggttgcgatgctgaaacaattatcctgagaataaatgccttggcctttatatggaaatgtggaactgagtggatatgctgtttttgtctgttaaacagagaagctggctgttatccactgagaagcgagcgaaacagtcgggaaaatctcccattatcgtagagatccgcattattaatctcaggagcctgtgtagcgtttataggaagtagtgttctgtcatgatgcctgcaagcggtaacgaaaacgatttgaatatgccttcaggaacaatagaaatcttcgtgcggtgttacgttgaagtggagcggattatgtcagcaatggacagaacaacctaatgaacacagaaccatgatgtggtctgtccttttacagccagtagtgctcgccgcagtcgagcgacagggcgaagccctcgagctggttgccctcgccgctgggctggcggctgtctatggccctgcaaacgcgccagaaacgccgtcgaagccgtgtgcgagacaccgcggccggccgccggcgttgtggatacctcgcggaaaacttggccctcactgacagatgaggggcggacgttgacacttgaggggccgactcacccggcgcggcgttgacagatgaggggcaggctcgatttcggccggcgacgtggagctggacagcctcgcaaatcggcgaaaacgcctgattttacgcgagtttcccacagatgatgtggacaagcctggggataagtgccctgcggtattgacacttgaggggcgcgactactgacagatgaggggcgcgatccttgacacttgaggggcagagtgctgacagatgaggggcgcacctattgacatttgaggggctgtccacaggcagaaaatccagcatttgcaagggtttccgcccgtttttcggccaccgctaacctgtcttttaacctgcttttaaaccaatatttataaaccttgtttttaaccagggctgcgccctgtgcgcgtgaccgcgcacgccgaaggggggtgcccccccttctcgaaccctcccggtcgagtgagcgaggaagcaccagggaacagcacttatatattctgcttacacacgatgcctgaaaaaacttcccttggggttatccacttatccacggggatatttttataattattttttttatagtttttagatcttcttttttagagcgccttgtaggcctttatccatgctggttctagagaaggtgttgtgacaaattgccctttcagtgtgacaaatcaccctcaaatgacagtcctgtctgtgacaaattgcccttaaccctgtgacaaattgccctcagaagaagctgttttttcacaaagttatccctgcttattgactcttttttatttagtgtgacaatctaaaaacttgtcacacttcacatggatctgtcatggcggaaacagcggttatcaatcacaagaaacgtaaaaatagcccgcgaatcgtccagtcaaacgacctcactgaggcggcatatagtctctcccgggatcaaaaacgtatgctgtatctgttcgttgaccagatcagaaaatctgatggcaccctacaggaacatgacggtatctgcgagatccatgttgctaaatatgctgaaatattcggattgacctctgcggaagccagtaaggatatacggcaggcattgaagagtttcgcggggaaggaagtggttttttatcgccctgaagaggatgccggcgatgaaaaaggctatgaatcttttccttggtttatcaaacgtgcgcacagtccatccagagggctttacagtgtacatatcaacccatatctcattcccttctttatcgggttacagaaccggtttacgcagtttcggcttagtgaaacaaaagaaatcaccaatccgtatgccatgcgtttatacgaatccctgtgtcagtatcgtaagccggatggctcaggcattgtctctctgaaaatcgactggatcatagagcgttaccagctgcctcaaagttaccagcgtatgcctgacttccgccgccgcttcctgcaggtctgtgttaatgagatcaacagcagaactccaatgcgcctctcatacattgagaaaaagaaaggccgccagacgactcatatcgtattttccttccgcgatatcacttccatgacgacaggatagtctgagggttatctgtcacagatttgagggtggttcgtcacatttgttctgacctactgagggtaatttgtcacagttttgctgtttccttcagcctgcatggattttctcatactttttgaactgtaatttttaaggaagccaaatttgagggcagtttgtcacagttgatttccttctctttcccttcgtcatgtgacctgatatcgggggttagttcgtcatcattgatgagggttgattatcacagtttattactctgaattggctatccgcgtgtgtacctctacctggagtttttcccacggtggatatttcttcttgcgctgagcgtaagagctatctgacagaacagttcttctttgcttcctcgccagttcgctcgctatgctcggttacacggctgcggcgagcgctagtgataataagtgactgaggtatgtgctcttcttatctccttttgtagtgttgctcttattttaaacaactttgcggttttttgatgactttgcgattttgttgttgctttgcagtaaattgcaagatttaataaaaaaacgcaaagcaatgattaaaggatgttcagaatgaaactcatggaaacacttaaccagtgcataaacgctggtcatgaaatgacgaaggctatcgccattgcacagtttaatgatgacagcccggaagcgaggaaaataacccggcgctggagaataggtgaagcagcggatttagttggggtttcttctcaggctatcagagatgccgagaaagcagggcgactaccgcacccggatatggaaattcgaggacgggttgagcaacgtgttggttatacaattgaacaaattaatcatatgcgtgatgtgtttggtacgcgattgcgacgtgctgaagacgtatttccaccggtgatcggggttgctgcccataaaggtggcgtttacaaaacctcagtttctgttcatcttgctcaggatctggctctgaaggggctacgtgttttgctcgtggaaggtaacgacccccagggaacagcctcaatgtatcacggatgggtaccagatcttcatattcatgcagaagacactctcctgcctttctatcttggggaaaaggacgatgtcacttatgcaataaagcccacttgctggccggggcttgacattattccttcctgtctggctctgcaccgtattgaaactgagttaatgggcaaatttgatgaaggtaaactgcccaccgatccacacctgatgctccgactggccattgaaactgttgctcatgactatgatgtcatagttattgacagcgcgcctaacctgggtatcggcacgattaatgtcgtatgtgctgctgatgtgctgattgttcccacgcctgctgagttgtttgactacacctccgcactgcagtttttcgatatgcttcgtgatctgctcaagaacgttgatcttaaagggttcgagcctgatgtacgtattttgcttaccaaatacagcaatagcaatggctctcagtccccgtggatggaggagcaaattcgggatgcctggggaagcatggttctaaaaaatgttgtacgtgaaacggatgaagttggtaaaggtcagatccggatgagaactgtttttgaacaggccattgatcaacgctcttcaactggtgcctggagaaatgctctttctatttgggaacctgtctgcaatgaaattttcgatcgtctgattaaaccacgctgggagattagataatgaagcgtgcgcctgttattccaaaacatacgctcaatactcaaccggttgaagatacttcgttatcgacaccagctgccccgatggtggattcgttaattgcgcgcgtaggagtaatggctcgcggtaatgccattactttgcctgtatgtggtcgggatgtgaagtttactcttgaagtgctccggggtgatagtgttgagaagacctctcgggtatggtcaggtaatgaacgtgaccaggagctgcttactgaggacgcactggatgatctcatcccttcttttctactgactggtcaacagacaccggcgttcggtcgaagagtatctggtgtcatagaaattgccgatgggagtcgccgtcgtaaagctgctgcacttaccgaaagtgattatcgtgttctggttggcgagctggatgatgagcagatggctgcattatccagattgggtaacgattatcgcccaacaagtgcttatgaacgtggtcagcgttatgcaagccgattgcagaatgaatttgctggaaatatttctgcgctggctgatgcggaaaatatttcacgtaagattattacccgctgtatcaacaccgccaaattgcctaaatcagttgttgctcttttttctcaccccggtgaactatctgcccggtcaggtgatgcacttcaaaaagcctttacagataaagaggaattacttaagcagcaggcatctaaccttcatgagcagaaaaaagctggggtgatatttgaagctgaagaagttatcactcttttaacttctgtgcttaaaacgtcatctgcatcaagaactagtttaagctcacgacatcagtttgctcctggagcgacagtattgtataagggcgataaaatggtgcttaacctggacaggtcccgtgttccaactgagtgtatagagaaaattgaggc
